(19) United States
(12) Patent Application Publication
(10) Pub. No.: US 2020/0393408 A1
(43) Pub. Date: Dec. 17, 2020

(54) ALLERGY ANTIGEN AND EPITOPE THEREOF

(71) Applicant: HOYU CO., LTD., Aichi (JP)

(72) Inventors: Kayoko Matsunaga, Aichi (JP); Akiko Yagami, Aichi (JP); Yuji Aoki, Aichi (JP); Erika Hasegawa, Aichi (JP); Tomomi Sakai, Aichi (JP)

(21) Appl. No.: 16/899,643

(22) Filed: Jun. 12, 2020

(30) Foreign Application Priority Data
Jun. 13, 2019 (JP) 110700/2019

(51) Int. Cl. G01N 27/447; C07K 1/28; G01N 33/68

(52) U.S. Cl. CPC G01N 27/44778; C07K 1/285; G01N 2800/24; G01N 33/6854; G01N 33/6893

(57) ABSTRACT

The present invention provides novel antigens of an allergy to wheat, methods and kits for diagnosing an allergy to wheat, compositions comprising such an antigen, wheat or processed products of wheat in which such an antigen is eliminated, and a tester composition for determining the presence or absence of a wheat antigen in an object of interest. The present invention also relates to polypeptides comprising an epitope of an antigen, kits, compositions and methods for diagnosing an allergy, comprising such a polypeptide, compositions comprising such a polypeptide, and raw materials or processed products in which an antigen comprising such a polypeptide is eliminated or reduced. The present invention further relates to a tester composition for determining the presence or absence of an antigen in an object of interest.

### TECHNICAL FIELD

[0001] The present invention relates to a novel antigen of an allergy to wheat, etc. The present invention also relates to a kit, a composition, and a method for diagnosing allergy to wheat, etc. The present invention also relates to a composition comprising such an antigen and raw materials or processed products in which such an antigen is eliminated or reduced. The present invention further relates to a tester composition for determining the presence or absence of a wheat antigen in an object of interest.

[0002] The present invention also relates to an antigen of a polypeptide comprising an epitope. The present invention also relates to a kit, a composition and a method for diagnosing an allergy, comprising such a polypeptide. The present invention also relates to a method for providing an indicator for diagnosing an allergy in a subject. The present invention also relates to a composition comprising such a polypeptide, and a raw material or a processed product in which such a polypeptide is eliminated or reduced. The present invention further relates to a method for producing a raw material and a processed product in which such a polypeptide is eliminated or reduced. The present invention further relates to a tester composition for determining the presence or absence of an antigen comprising such a polypeptide in an object of interest.

### BACKGROUND ART

[0003] In serum and tissues of allergic patients, IgE antibodies specific to particular antigens (hereinafter also referred to as allergens) are produced. Physiological consequences caused by interaction between such IgE antibodies and such particular antigens elicit allergic reactions. The antigens refer to food or cooking ingredients, etc. that cause allergic symptoms in a broad sense, and refer to proteins (hereinafter also referred to as allergen components) contained in food or cooking ingredients, etc. to which specific IgE antibodies bind in a narrow sense.

[0004] In the process of production of conventional allergy testing agents, antigen reagents are commonly prepared simply by grinding a candidate allergenic food, cooking ingredient or the like (Patent Literature 1). For this reason, the only case where conventional allergy tests have permitted detection of a positive allergic reaction is when in a conventional antigen reagent containing many types of allergen components, an allergen component is present in an amount exceeding a threshold that allows determination of a positive reaction for binding to an IgE antibody, and diagnosis efficiency was not sufficiently high.

[0005] Some allergen components have been suggested for allergen candidate food or cooking ingredients, and have also been commercialized as testing kits. While it is necessary to exhaustively identify allergen components in order to enhance the reliability of allergy tests, the patient detection rate by the measurement of such allergenic components is far from sufficient. Identification of novel allergens in wheat is very important not only for increasing the precision of diagnosis, but also for determining targets of low allergenic food, low allergenic cooking ingredients and therapeutic agents.

[0006] Meanwhile, in the field of protein separation and purification, a method for separating and purifying many different proteins from a small amount of sample has been used in recent years, which is more specifically a two-dimensional electrophoresis consisting of isoelectric focusing in the first dimension, followed by SDS-PAGE (sodium dodecyl sulfate-polyacrylamide gel electrophoresis) in the second dimension. The present applicant has conventionally developed some 2D electrophoresis methods with high separation ability (Patent Literature 2-5).

[0007] Allergen-specific IgE antibodies recognize and bind to epitopes that are particular amino acid sequences in allergen components. However, only a slight number of analyses have been made on epitopes as to the allergen components (Non Patent Literature 1), but such analyses are still totally quite rare. Furthermore, any kit for diagnosing an allergy using a polypeptide comprising an epitope has not yet emerged in the market.

### CITATION LIST

### Patent Literature

[0008] PTL1: Japanese Patent Application Publication No. JP 2002-286716
[0009] PTL2: Japanese Patent Application Publication No. JP 2011-33544
[0010] PTL3: Japanese Patent Application Publication No. JP 2011-33546
[0011] PTL4: Japanese Patent Application Publication No. JP 2011-33547
[0012] PTL5: Japanese Patent Application Publication No. JP 2011-33548

### Non Patent Literature

[0013] NPL 1: Matsuo, H., et al., J. Biol. Chem., (2004), Vol. 279, No. 13, pp. 12135-12140

### SUMMARY OF INVENTION

### Technical Problem

[0014] The present invention provides novel antigens of an allergy which are proteins. The present invention also provides methods and kits for diagnosing allergy, comprising such an antigen. The present invention also provides compositions comprising such an antigen and raw materials or processed products in which such an antigen is eliminated or reduced. The present invention further provides tester compositions for determining the presence or absence of an antigen in an object of interest.

[0015] The present invention also provides antigens of polypeptides comprising an epitope. The present invention also provides kits, compositions and methods for diagnosing an allergy, comprising such a polypeptide. The present invention also provides methods for providing an indicator for diagnosing an allergy in a subject. The present invention also provides compositions comprising such a polypeptide, and raw materials or processed products in which an antigen comprising such a polypeptide is eliminated or reduced. The present invention further relates to methods for producing a raw material and a processed product in which such an antigen is eliminated or reduced. The present invention further relates to tester compositions for determining the presence or absence of an antigen comprising such a polypeptide in an object of interest.

### Solution to Problem

[0016] In order to solve the aforementioned problems, the present inventors had made intensive studies to identify causative antigens of an allergy to wheat. As a result, the inventors succeeded in identifying novel antigens of proteins to which an IgE antibody in the serum of a patient who is allergic to wheat specifically binds.

[0017] Since the epitopes have a relatively short amino acid sequence, the IgE antibodies are capable of binding to different allergen components if the same amino acid sequence is present in the different allergen components. Because different allergen components have a common epitope so that IgE antibodies from allergic patients bind to both of them, the antigens have cross-reactivity. Thus, the epitopes defined in the present invention enable diagnosis or treatment of an allergy including cross-reactivity, and detection of a plurality of allergen components comprising the epitopes, etc.

[0018] As referred to herein, the “antigen” is used in meanings including both an antigen in a narrow sense which is a protein and an “epitope” derived from the protein, unless otherwise specified. The “antigen” is used in any meaning of the protein or the epitope derived from the protein as specified.

[0019] The present invention has been completed based on the aforementioned finding. The present invention includes the following embodiments, but the present invention is not limited to them.

[Embodiment 1] A kit for diagnosing an allergy, comprising at least one of the following polypeptides (E1) to (E50):

[0020] (E1) a polypeptide comprising at least one amino acid sequence selected from the amino acid sequences of SEQ ID NOs: 29-130 and 2880;

[0021] (E2) a polypeptide comprising at least one amino acid sequence selected from the amino acid sequences of SEQ ID NOs: 131-137 and 139-190;

[0022] (E3) a polypeptide comprising at least one amino acid sequence selected from the amino acid sequences of SEQ ID NOs: 191-280 (except for 227, 259, 269 and 273) and 2881;

[0023] (E4) a polypeptide comprising at least one amino acid sequence selected from the amino acid sequences of SEQ ID NOs: 281-341 and 343-345;

[0024] (E5) a polypeptide comprising at least one amino acid sequence selected from the amino acid sequences of SEQ ID NOs: 346-398, 400-413 and 2882;

[0025] (E6) a polypeptide comprising at least one amino acid sequence selected from the amino acid sequences of SEQ ID NOs: 414-492, 2883 and 2884;

[0026] (E7) a polypeptide comprising at least one amino acid sequence selected from the amino acid sequences of SEQ ID NOs: 493-561;

[0027] (E8) a polypeptide comprising at least one amino acid sequence selected from the amino acid sequences of SEQ ID NOs: 562-639;

[0028] (E9) a polypeptide comprising at least one amino acid sequence selected from the amino acid sequences of SEQ ID NOs: 640-705 and 2885-2888;

[0029] (E10) a polypeptide comprising at least one amino acid sequence selected from the amino acid sequences of SEQ ID NOs: 706-775 and 2889-2891;

[0030] (E11) a polypeptide comprising at least one amino acid sequence selected from the amino acid sequences of SEQ ID NOs: 776-898 and 2892;

[0031] (E12) a polypeptide comprising at least one amino acid sequence selected from the amino acid sequences of SEQ ID NOs: 899-973, 2893 and 2895;

[0032] (E13) a polypeptide comprising at least one amino acid sequence selected from the amino acid sequences of SEQ ID NOs: 974-1009;

[0033] (E14) a polypeptide comprising at least one amino acid sequence selected from the amino acid sequences of SEQ ID NOs: 1010-1088 and 2896-2899;

[0034] (E15) a polypeptide comprising at least one amino acid sequence selected from the amino acid sequences of SEQ ID NOs: 1089-1141;

[0035] (E16) a polypeptide comprising at least one amino acid sequence selected from the amino acid sequences of SEQ ID NOs: 1142-1165 and 2900;

[0036] (E17) a polypeptide comprising at least one amino acid sequence selected from the amino acid sequences of SEQ ID NOs: 1166-1208;

[0037] (E18) a polypeptide comprising at least one amino acid sequence selected from the amino acid sequences of SEQ ID NOs: 1209-1256;

[0038] (E19) a polypeptide comprising at least one amino acid sequence selected from the amino acid sequences of SEQ ID NOs: 1257-1296;

[0039] (E20) a polypeptide comprising at least one amino acid sequence selected from the amino acid sequences of SEQ ID NOs: 1297-1366;

[0040] (E21) a polypeptide comprising at least one amino acid sequence selected from the amino acid sequences of SEQ ID NOs: 1367-1402;

[0041] (E22) a polypeptide comprising at least one amino acid sequence selected from the amino acid sequences of SEQ ID NOs: 1403-1507;

[0042] (E23) a polypeptide comprising at least one amino acid sequence selected from the amino acid sequences of SEQ ID NOs: 1508-1565 and 2901;

[0043] (E24) a polypeptide comprising at least one amino acid sequence selected from the amino acid sequences of SEQ ID NOs: 1566-1597;

[0044] (E25) a polypeptide comprising at least one amino acid sequence selected from the amino acid sequences of SEQ ID NOs: 1598-1607;

[0045] (E26) a polypeptide comprising at least one amino acid sequence selected from the amino acid sequences of SEQ ID NOs: 1608-1684, 2902 and 2903;

[0046] (E27) a polypeptide comprising at least one amino acid sequence selected from the amino acid sequences of SEQ ID NOs: 1685-1752, 2904 and 2905;

[0047] (E28) a polypeptide comprising at least one amino acid sequence selected from the amino acid sequences of SEQ ID NOs: 1753-1788, 2906 and 2907;

[0048] (E29) a polypeptide comprising at least one amino acid sequence selected from the amino acid sequences of SEQ ID NOs: 1789-1835, 2908 and 2909;

[0049] (E30) a polypeptide comprising at least one amino acid sequence selected from the amino acid sequences of SEQ ID NOs: 1836-1894, 2910 and 2911;

[0050] (E31) a polypeptide comprising at least one amino acid sequence selected from the amino acid sequences of SEQ ID NOs: 1895-1976, 2912 and 2913;

[0051] (E32) a polypeptide comprising at least one amino acid sequence selected from the amino acid sequences of SEQ ID NOs: 1977-2003;

[0052] (E33) a polypeptide comprising at least one amino acid sequence selected from the amino acid sequences of SEQ ID NOs: 2004-2026;

[0053] (E34) a polypeptide comprising at least one amino acid sequence selected from the amino acid sequences of SEQ ID NOs: 2027-2067 and 2914;

[0054] (E35) a polypeptide comprising at least one amino acid sequence selected from the amino acid sequences of SEQ ID NOs: 2068-2153, 2915 and 2916;

[0055] (E36) a polypeptide comprising at least one amino acid sequence selected from the amino acid sequences of SEQ ID NOs: 2154-2216;

[0056] (E37) a polypeptide comprising at least one amino acid sequence selected from the amino acid sequences of SEQ ID NOs: 2217-2264 and 2917-2921;

[0057] (E38) a polypeptide comprising at least one amino acid sequence selected from the amino acid sequences of SEQ ID NOs: 2265-2308 and 2922-2925;

[0058] (E39) a polypeptide comprising at least one amino acid sequence selected from the amino acid sequences of SEQ ID NOs: 2309-2341;

[0059] (E40) a polypeptide comprising at least one amino acid sequence selected from the amino acid sequences of SEQ ID NOs: 2342-2418;

[0060] (E41) a polypeptide comprising at least one amino acid sequence selected from the amino acid sequences of SEQ ID NOs: 2419-2490;

[0061] (E42) a polypeptide comprising at least one amino acid sequence selected from the amino acid sequences of SEQ ID NOs: 2491-2544, 2926 and 2927;

[0062] (E43) a polypeptide comprising at least one amino acid sequence selected from the amino acid sequences of SEQ ID NOs: 2545-2612;

[0063] (E44) a polypeptide comprising at least one amino acid sequence selected from the amino acid sequences of SEQ ID NOs: 2613-2630;

[0064] (E45) a polypeptide comprising at least one amino acid sequence selected from the amino acid sequences of SEQ ID NOs: 2631-2673;

[0065] (E46) a polypeptide comprising at least one amino acid sequence selected from the amino acid sequences of SEQ ID NOs: 2674-2700 and 2928;

[0066] (E47) a polypeptide comprising at least one amino acid sequence selected from the amino acid sequences of SEQ ID NOs: 2701-2773 and 2929;

[0067] (E48) a polypeptide comprising at least one amino acid sequence selected from the amino acid sequences of SEQ ID NOs: 2774-2808, 2930 and 2931;

[0068] (E49) a polypeptide comprising at least one amino acid sequence selected from the amino acid sequences of SEQ ID NOs: 2809-2829; and

[0069] (E50) a polypeptide comprising at least one amino acid sequence selected from the amino acid sequences of SEQ ID NOs: 2830-2879 and 2932. [Embodiment 2] A composition for diagnosing an allergy, the composition comprising at least one of polypeptides (E1) to (E50) according to Embodiment 1. [Embodiment 3] A method for providing an indicator for diagnosing an allergy in a subject, the method comprising the steps of:

[0070] (i) contacting a sample obtained from the subject with an antigen, wherein the sample is a solution comprising an IgE antibody;

[0071] (ii) detecting binding between the IgE antibody present in the sample obtained from the subject and the antigen; and

[0072] (iii) when the binding between the IgE antibody in the subject and the antigen is detected, an indicator of the fact that the subject is allergic is provided;

[0073] wherein the antigen is at least one of polypeptides (E1) to (E50) according to Embodiment 1.

[Embodiment 4] An antigen which is at least one of polypeptides (E1) to (E50) according to Embodiment 1 and is causative of an allergy.
[Embodiment 5] A composition comprising at least one antigen according to Embodiment 4.
[Embodiment 6] The composition according to Embodiment 5, wherein the composition is intended for the treatment of an allergy.
[Embodiment 7] A tester composition for determining the presence or absence of an antigen in a subject, the tester composition comprising an antibody that binds to at least one of polypeptides (E1) to (E50) according to Embodiment 1.
[Embodiment 8] A tester composition for determining the presence or absence of an antigen in an object of interest, the tester composition comprising at least one primer comprising a portion of the nucleotide sequence of a nucleic acid encoding any of polypeptides (E1) to (E50) according to Embodiment 1, and/or a portion of a complementary strand thereof.
[Embodiment 9] A tester composition for determining the presence or absence of an IgE antibody in a subject, the tester composition comprising polypeptides (E1) to (E50) according to Embodiment 1.
[Embodiment 10] A method for determining the presence or absence of polypeptides (E1) to (E50) according to Embodiment 1 in a raw material or a processed product, comprising detecting the polypeptides (E1) to (E50) according to Embodiment 1 in the raw material or the processed product.
[Embodiment 11] A raw material or a processed product in which an antigen is eliminated or reduced, wherein the antigen is at least one of polypeptides (E1) to (E50) according to Embodiment 1.
[Embodiment 12] A method for producing a raw material or a processed product in which an antigen is eliminated or reduced, the method comprising the step of confirming that the antigen is eliminated or reduced, in a production process of the processed product, wherein the antigen is at least one of polypeptides (E1) to (E50) according to Embodiment 1.

### Advantageous Effects of Invention

[0074] The present invention can provide novel antigens of an allergy (e.g., an allergy to wheat). Since the novel allergen components that trigger an allergy were identified according to this invention, this invention can provide highly sensitive methods and kits for diagnosing an allergy, compositions comprising such an antigen, raw materials or processed products in which such an antigen is eliminated or reduced, and tester compositions for determining the presence or absence of an antigen in an object of interest.

[0075] The present invention can provide antigens of novel polypeptides comprising an epitope of a protein antigen. Use of the polypeptide of the present invention enables provision of highly sensitive kits, compositions and methods for diagnosing an allergy (e.g., an allergy to wheat), compositions comprising such a polypeptide, tester compositions for determining the presence or absence of an antigen comprising such a polypeptide in an object of interest, and raw materials or processed products in which such a polypeptide is eliminated or reduced, and a method for producing the raw materials and the processed products.

### BRIEF DESCRIPTION OF DRAWINGS

[0076] FIG. 1 is a photograph of a gel showing a protein electrophoretic pattern in two-dimensional electrophoresis of proteins contained in wheat. The bands at the left of the photograph are bands of molecular weight markers, and the numeric values at the left of the photograph are respective molecular weights (KDa) of the molecular weight markers. The numeric values at the top of the photograph represent isoelectric points.

[0077] FIG. 2 is a photograph of an immunoblot of a two-dimensional electrophoretic pattern of proteins contained in wheat stained with serum of a wheat-allergic patient. Spots 1 to 16 where an IgE antibody in the serum of the wheat-allergic patient specifically reacted as compared with healthy subjects are each enclosed in a white line. WDEIA cases in wheat-allergic patients are represented by P2 to P36, children of cases with general immediate type allergy to wheat, which requires no exercise for its development, are represented by P50 to P57, and adults are represented by G1 to G9.

[0078] FIG. 3 shows results of examining cross-reactivity of peptides having the amino acid sequence of each epitope by ELISA using serum of a patient associated with an allegy to wheat.

[0079] FIG. 4 shows results of examining cross-reactivity of peptides having the amino acid sequence of each epitope by ELISA using serum of a patient associated with an allegy to wheat.

[0080] FIG. 5 shows results of examining cross-reactivity of peptides having the amino acid sequence of each epitope by ELISA using serum of a patient associated with an allegy to wheat.

[0081] FIG. 6 shows results of examining cross-reactivity of peptides having the amino acid sequence of each epitope by ELISA using serum of a patient associated with an allegy to wheat.

### DESCRIPTION OF EMBODIMENTS

[0082] The present invention will be described in detail below, but the present invention is not limited to them.

[0083] Unless otherwise defined herein, all scientific and technical terms used in relation to the present invention shall have meanings commonly understood by those skilled in the art.

[0084] As referred to herein, the “allergy” refers to the state in which, when a certain antigen enters the body of a living individual sensitized to said antigen, the living individual shows a hypersensitive reaction detrimental to him/her. An allergic reaction can be produced upon contact with an antigen or consumption of the antigen. Here, the contact refers to touch to an object and, particularly, as for the human body, refers to attachment to the skin, the mucosa (eyes, lips, etc.) or the like. The consumption refers to incorporation into the body and refers to incorporation by inhalation or through an oral route, etc. In general, allergic reactions caused by consumption of foods are particularly referred to as food allergies. In a preferred embodiment, the allergy may be a food allergy. In blood and tissues of individuals with many food-allergic diseases, IgE antibodies specific to antigens are produced. IgE antibodies bind to mast cells or basophils. When an antigen specific to such an IgE antibody enters again the body of a patient with an allergic disease, said antigen combines with the IgE antibody bound to mast cells or basophils, resulting in physiological effects of IgE antibody-antigen interaction. Examples of such physiological effects include release of histamine, serotonin, heparin, eosinophil chemotactic factors, leucotrienes, or the like. These released substances provoke an allergic reaction resulting from the combination of an IgE antibody with particular antigens. Specifically, IgE antibodies recognize and bind to epitopes that are particular amino acid sequences in particular antigens. Allergic reactions caused by such antigens occur through the aforementioned pathway.

[0085] In the present invention, the allergy of interest is not particularly limited as long as it is an allergy to an allergen (antigen) comprising an epitope to be used. In one embodiment, the allergen includes grain, seafood, fruits, vegetables, nuts (seeds), edible grass, meat, milk, dairy products and the like that are consumed by living individuals (particularly, humans), or parasites and the like that parasitize living individuals (particularly, humans).

[0086] The grain is a generic name for cooking ingredients obtained from plants, and means edible seeds composed mainly of starch. The grain refers to only seeds of crops of the family Poaceae (cereal crops) in a narrow sense and includes these seeds as well as seeds of crops of the family Leguminosae (bean crops) or seeds of crops of other families in a broad sense. As for the grain in the broad sense, dicotyledonous seeds available as grain are collectively called pseudocereals because of their similarity to seeds of cereal crops (seeds of crops of the family Poaceae which are monocotyledonous plants). The pseudocereals include buckwheat (family Polygonaceae), amaranth (family Amaranthaceae), quinua (quinoa; family Chenopodiaceae) and the like.

[0087] In the present invention, the grain of the family Poaceae is not limited and includes bread wheat (Triticum aestivum), barley, rye, oat, timothy, orchard grass, vernal grass, common millet, foxtail millet, Japanese millet, corn, Job's tears and the like. The grain of the family Polygonaceae includes, for example, buckwheat (Fagopyrum esculentum). In one embodiment, an antigen (allergen) is derived from grain. In one embodiment, an allergen is derived from grain of the family Poaceae. In one embodiment, an allergen is derived from wheat.

[0088] The seafood is not limited and includes shrimps, crabs and the like belonging to the order Decapoda. Most of organisms generally recognized as “crustaceans” are included in the order Decapoda. The seafood is not limited and also includes squids and octopuses belonging to the order Teuthida or the order Octopoda. The seafood further includes fishes belonging to the family Scombridae or the family Gadidae. Furthermore, the seafood also includes clams of the family Veneridae.

[0089] The fruits are not limited and include, for example, fruits belonging to the family Actinidiaceae, the family Bromeliaceae, the family Anacardiaceae, the family Cucurbitaceae, the family Musaceae, the family Rutaceae, and the family Rosaceae. The vegetables include, for example, fruits belonging to the family Solanaceae, the family Cucurbitaceae, and the family Lauraceae. The nuts (seeds) include, for example, nuts (seeds) belonging to the family Anacardiaceae, the family Rosaceae, and the family Juglandaceae. The edible grass includes, for example, edible grass belonging to the family Compositae. The grain includes, for example, grain belonging to the family Poaceae and the family Polygonaceae.

[0090] The type of the meat is not particularly limited. In one embodiment, meat of birds (chicken meat, canard viande, etc.), pork, beef, sheep meat, and the like are included therein. In one embodiment, meat of a bird is used. In one embodiment, meat of chicken (Gallus gallus) is used.

[0091] The origin of the milk is not particularly limited. In one embodiment, milk derived from a cow, a goat, sheep or the like is included therein. In one embodiment, milk of a cow (Bos taurus) is used. The dairy products are processed products of milk. The dairy products are not limited and include butter, fresh cream, cheese, yogurt, and ice cream.

[0092] The parasites are not limited and include, for example, parasites of the family Anisakidae. The parasites of the family Anisakidae include anisakis (Anisakis simplex).

[0093] As referred to herein, the allergy refers to the state in which an individual has an allergic reaction caused by proteins, etc. present in raw materials or processed products (e.g., wheat or processed products of wheat)) which act as an antigen. The allergy can produce an allergic reaction upon contact with an antigen contained in raw materials or processed products (e.g., wheat or processed products of wheat) or consumption of the antigen. In general, allergic reactions caused by consumption of foods are particularly referred to as food allergies. The allergy to wheat may be a food allergy.

[0094] As referred to herein, the “antigen” refers to a substance that provokes an allergic reaction. A protein contained in raw materials such as cooking ingredients is also referred to as an allergen component. The antigen is preferably a protein.

[0095] As referred to herein, the protein is a molecule having a structure in which naturally occurring amino acids are joined together by peptide bond. The number of amino acids present in a protein is not particularly limited. As referred to herein, the term “polypeptide” also means a molecule having a structure in which naturally occurring amino acids are joined together by peptide bond. The number of amino acids present in a polypeptide is not particularly limited. The “polypeptide” conceptually includes the “protein”. Also, polypeptides having about 2 to 50 amino acids joined together by peptide bond are in some cases called “peptides”, especially.

[0096] In the case where amino acids can form different enantiomers, the amino acids are understood to form an L-enantiomer, unless otherwise indicated. The amino acid sequences of proteins, polypeptides, or peptides as used herein are represented by one-letter symbols of amino acids in accordance with standard usage and the notational convention commonly used in the art. The leftward direction represents the amino-terminal direction, and the rightward direction represents the carboxy-terminal direction. In the one-letter symbols of amino acids, X can be any substance having an amino group and a carboxyl group that can bind to amino acids at both ends, and particularly represents that any of 20 types of naturally occurring amino acids are acceptable.

[0097] An alanine scanning technique (or an “alanine/glycine scanning” technique) is a method in which variants in which residues in a protein are varied one by one to alanine (or glycine when the original amino acid is alanine) are prepared to identify site-specific residues important for the structure or function of the protein. Residues at positions where binding activity against IgE antibodies from patients remain even after the variation to alanine (or glycine when the original amino acid is alanine) are not important for the binding activity against IgE antibodies, and the binding activity remains even after exchange of these residues with other amino acids. The binding activity against IgE antibodies refers to detected binding and reaction between an epitope of interest and an IgE antibody. The residue of X in the Sequence Listing of the present application is an amino acid residue at a site where binding activity against IgE antibodies from allergic patients remains even after substitution by alanine (or glycine when the original amino acid is alanine) in alanine/glycine scanning described in Example 4. It is well known to those skilled in the art that even when such a site is substituted by any other amino acids, it is highly probable that this binding activity against IgE antibodies remains. Specifically, such a residue can be substituted by not only alanine or glycine but also any given amino acid residue other than alanine.

[0098] The binding and maintenance between IgE and an antigen (an epitope) are important for a subsequent allergic reaction, and this binding and maintenance are brought about by the electric charge, hydrophobic bond, hydrogen bond, and aromatic interaction of the epitope. Binding and maintenance that can be attained even if these are lost by change to alanine or glycine mean that the amino acid is not important.

[0099] Identification of Antigens

[0100] Proteins contained in wheat (bread wheat (Triticum aestivum)) were subjected to two-dimensional electrophoresis under the conditions described below to identify an antigen of an allergy to wheat.

[0101] The electrophoresis in the first dimension was isoelectric focusing, which was performed using isoelectric focusing gels with a gel-strip length of 5 to 10 cm and a gel pH range of 3 to 10. The pH gradient of the gels in the direction of electrophoresis was as follows: when the total gel-strip length is taken as 1, the gel-strip length up to pH 5 is taken as “a”, the gel-strip length from pH 5 to 7 is taken as “b”, and the gel-strip length above pH 7 is taken as “c”, “a” is in the range of 0.15 to 0.3, “b” is in the range of 0.4 to 0.7, and “c” is in the range of 0.15 to 0.3. More specifically, the isoelectric focusing was performed using the IPG gels, Immobiline Drystrip (pH3-10NL), produced by GE Healthcare Bio-Sciences Corporation (hereinafter abbreviated as “GE”). The electrophoresis system used was IPGphor produced by GE. The maximum current of the electrophoresis system was limited to 75 μA per gel strip. The voltage program adopted to perform the first-dimensional isoelectric focusing was as follows: (1) a constant voltage step was performed at a constant voltage of 300 V until the volt-hours reached 750 Vhr (the current variation width during electrophoresis for 30 minutes before the end of this step was 5 μA); (2) the voltage was increased gradually to 1000 V for 300 Vhr; (3) the voltage was further increased gradually to 5000 V for 4500 Vhr; and then (4) the voltage was held at a constant voltage of 5000 V until the total Vhr reached 12000.

[0102] The electrophoresis in the second dimension was SDS-PAGE, which was performed using polyacrylamide gels whose gel concentration at the distal end in the direction of electrophoresis was set to 3 to 6% and whose gel concentration at the proximal end was set to a higher value than that at the distal end. More specifically, the SDS-PAGE was performed using NuPAGE 4-12% Bis-Tris Gels (IPG well, Mini, 1 mm) produced by Life Technologies. The electrophoresis system used was XCell SureLock Mini-Cell produced by Life Technologies. The electrophoresis was run at a constant voltage of 200 V for about 45 minutes using an electrophoresis buffer composed of 50 mM MOPS, 50 mM Tris base, 0.1% (w/v) SDS and 1 mM EDTA.

[0103] As a result, antigens in the following spots 1 to 16 in a two-dimensional electrophoresis gel run under the conditions described above for proteins in wheat have been revealed to specifically bind to IgE antibodies from wheat-allergic patients (FIG. 2).

[0104] Antigen (Protein)

[0105] Sequence identification of the antigen in each spot was performed by mass spectrometry. The mass spectroscopic data obtained on a mass spectrometer was analyzed by comparing the data against the Uniprot protein data. As a result, each of spots 1 to 16 was found to be identical to a known sequence.

[0106] Information on each spot is summarized in Table 1 below.

TABLE 1
MW;35kDa

| SPOT No. | | | (1) |
|---|---|---|---|
| protein | Isoelectric | Range | 5-11 |
| | point | Preferably | 5.5-10 |
| | | More | 6-9 |
| | | preferably | |
| | Molecular | Range | 10-80 |
| | weight | Preferably | 20-60 |
| | | More | 30-50 |
| | | preferably | |
| | Searched DB | | Uniprot |
| | Organism species | | Wheat (Triticum aestivum) |
| | accession No. | | P18573 |
| | Protein name | | alpha/beta gliadin MM1 |
| | | | MKTFLILALLAIVATTARIAVRVPVPQLQPQNPSQQQPQEQVPLVQQQQFPGQ |
| | | | QQPFPPQQPYPQPQPFPSQQPYLQLQPFPQPQLPYPQPQLPYPQPQLPYPQPQPF |
| | Full-length | | RPQQPYPQSQPQYSQPQQPISQQQQQQQQQQQQKQQQQQQQQILQQILQQQL |
| | sequence | | IPCRDVVLQQHSIAYGSSQVLQQSTYQLVQQLCCQQLWQIPEQSRCQAIHNVV |
| | (SEQ ID NO: 2) | | HAIILHQQQQQQQQQQQQPLSQVSFQQPQQQYPSGQGSFQPSQQNPQAQGSV |
| | | | QPQQLPQFEEIRNLALETLPAMCNVYIPPYCTIAPVGIFGTN |
| DNA | Searched DB | | EMBL-EBI |
| | accession No. | | CAA35238.1 |
| | Full-length | | ATGAAGACCTTTCTCATCCTTGCCCTCCTTGCTATTGTAGCAACCACCGCCAGAATTGCA |
| | sequence | | GTTAGAGTTCCAGTGCCACAATTGCAGCCACAAAATCCATCTCAGCAACAACCACAAGAG |
| | (SEQ ID NO: 1) | | CAAGTTCCATTGGTACAACAACAACAATTTCCAGGGCAGCAACAACCATTTCCACCACAA |
| | | | CAGCCATATCCGCAGCCGCAACCATTTCCATCACAACAACCATATCTGCAGCTGCAACCA |
| | | | TTTCCGCAGCCGCAACTACCATATCCGCAGCCGCAACTACCATATCCGCAGCCGCAACTA |
| | | | CCATATCCGCAGCCGCAACCATTTCGACCACAACAACCATATCCACAATCGCAACCACAG |
| | | | TATTCGCAACCACAACAACCAATTTCGCAGCAGCAGCAGCAGCAACAACAACAACAACAA |
| | | | CAAAAACAACAACAACAACAACAACAACAGATCCTTCAACAAATTTTGCAACAACAACTG |
| | | | ATTCCATGCAGGGATGTTGTATTGCAACAACACAGCATAGCGTATGGAAGCTCACAAGTT |
| | | | TTGCAACAAAGTACTTACCAGCTGGTGCAACAATTGTGTTGTCAGCAGCTGTGGCAGATC |
| | | | CCCGAGCAGTCGCGGTGCCAAGCCATCCACAATGTTGTTCATGCTATTATTCTGCATCAA |
| | | | CAGCAACAACAACAACAACAACAACAACAACAACCGTTGAGCCAGGTCTCCTTCCAACAG |
| | | | CCTCAACAACAATATCCATCAGGCCAGGGCTCCTTCCAGCCATCTCAGCAAAACCCACAG |
| | | | GCCCAGGGCTCTGTCCAGCCTCAACAACTGCCCCAGTTTGAGGAAATAAGGAACCTAGCG |
| | | | CTAGAGACGCTACCTGCAATGTGCAATGTCTATATCCCTCCATATTGCACCATTGCTCCA |
| | | | GTTGGCATCTTCGGTACTAAC |

MW;45kDa

| SPOT No. | | | (2) |
|---|---|---|---|
| protein | Isoelectric | Range | 6-12 |
| | point | Preferably | 7-11 |
| | | More | 8-10 |
| | | preferably | |
| | Molecular | Range | 20-100 |
| | weight | Preferably | 25-80 |
| | | More | 30-70 |
| | | preferably | |
| | Searched DB | | Uniprot |
| | Organism species | | Wheat (Triticum aestivum) |
| | accession No. | | V9P767 |
| | Protein name | | LMW-m glutenin subunit 8 |
| | Full-length sequence | | MKTFLIFALLAIAATSAIAQMETSRVPGLEKPWQQQPLPPQQQPPCSQQQQPFP |
| | (SEQ ID NO: 4) | | QQQQPIIILQQSPFSQQQQPVLPQQQPVIILQQPPFSQQQQPVLPQQPPFSQQQQ |
| | | | QQQQQQPPFSQQQQPVLPQQPPFSQQQQPPFSQQQQPSSQQPPFPQQHQQFPQ |
| | | | QQIPVVQPSVLQQLNPCKVFLQQQCSHVAMSQRLARSQMWQQSSCHVMQQQ |
| | | | CCQQLPQIPEQSRSEAIRAIVYSIILQEQQQGFVQPQQQQPQQSGQGVSQHQQQ |
| | | | SQQQQQLGQCSFQQPQQLQQLGQQPQQQQIPQGIFLQPHQISQLEVMTSIALR |
| | | | TLPTMCGVNVPLYSFDPLMPFSIGTGVGGY |
| DNA | Searched DB | | EMBL-EBI |
| | accession No. | | AGU91662.1 |
| | Full-length sequence | | ATGAAGACCTTCCTCATCTTTGCTCTCCTTGCCATTGCGGCGACAAGTGCCATTGCACAA |
| | (SEQ ID NO: 3) | | ATGGAGACTAGCCGCGTCCCTGGTTTGGAGAAACCATGGCAGCAACAACCATTACCACCA |
| | | | CAACAACAACCACCATGTTCACAGCAACAACAACCATTTCCACAGCAACAACAACCAATT |
| | | | ATTATACTGCAACAATCACCATTTTCGCAGCAACAACAACCAGTTCTGCCGCAACAGCAA |
| | | | CCAGTTATTATACTGCAACAACCACCATTTTCGCAGCAACAACAACCAGTTCTACCACAA |
| | | | CAACCACCATTTTCACAACAACAACAACAACAACAACAACAACAACCACCATTTTCGCAG |
| | | | CAACAACAACCAGTTCTACCACAACAACCACCATTTTCACAACAACAACAACCACCATTT |
| | | | TCGCAGCAGCAACAACCATCTTCACAACAACCACCTTTTCCACAACAACACCAACAGTTT |
| | | | CCACAACAACAAATCCCTGTTGTTCAACCATCCGTTTTGCAGCAGCTAAACCCATGCAAG |
| | | | GTGTTCCTCCAACAGCAGTGTAGCCATGTGGCAATGTCGCAACGTCTTGCTAGGTCACAA |
| | | | ATGTGGCAACAGAGTAGTTGCCATGTGATGCAACAACAATGTTGCCAACAGCTGCCGCAA |
| | | | ATCCCCGAACAATCCCGCTCTGAGGCAATCCGTGCCATCGTCTACTCCATCATCCTGCAA |
| | | | GAACAACAACAGGGTTTTGTCCAACCTCAGCAGCAACAACCCCAACAGTCGGGCCAAGGT |
| | | | GTCTCCCAACACCAACAGCAGTCGCAGCAGCAGCAGCAACTCGGACAGTGTTCTTTCCAA |
| | | | CAACCTCAACACTACAACAATTGGGTCAGCAGCCTCAACAACAACAGATACCACAGGGT |
| | | | ATATTCTTGCAGCCACACCAGATATCTCAACTTGAGGTGATGACTTCCATTGCACTCCGT |
| | | | ACCCTGCCAACGATGTGCGGTGTCAACGTGCCGTTGTACAGCTTCGACCCACTTATGCCA |
| | | | TTTAGCATTGGCACTGGAGTTGGTGGCTAC |

MW;35kDa

| SPOT No. | | | (3) |
|---|---|---|---|
| protein | Isoelectric | Range | 5-11 |
| | point | Preferably | 5.5-10 |
| | | More | 6-9 |
| | | preferably | |
| | Molecular | Range | 10-80 |
| | weight | Preferably | 20-60 |
| | | More | 30-50 |
| | | preferably | |
| | Searched DB | | Uniprot |
| | Organism species | | Wheat (Triticum aestivum) |
| | accession No. | | P08453 |
| | Protein name | | gamma-gliadin |
| | Full-length sequence | | MKTLLILTILAMAITIGTANIQVDPSGQVQWLQQQLVPQLQQPLSQQPQQTFP |
| | (SEQ ID NO: 6) | | QPQQTFPHQPQQQVPQPQQPQQPFLQPQQPFPQQPQQPFPQTQQPQQPFPQQP |
| | | | QQPFPQTQQPQQPFPQQPQQPFPQTQQPQQPFPQLQQPQQPFPQPQQQLPQPQ |
| | | | QPQQSFPQQQRPFIQPSLQQQLNPCKNILLQQSKPASLVSSLWSIIWPQSDCQV |
| | | | MRQQCCQQLAQIPQQLQCAAIHSVVHSIIMQQQQQQQQQQGIDIFLPLSQHEQ |
| | | | VGQGSLVQGQGIIQPQQPAQLEAIRSLVLQTLPSMCNVYVPPECSIMRAPFASI |
| | | | VAGIGGQ |
| DNA | Searched DB | | EMBL-EBI |
| | accession No. | | AAA34289.1 |
| | Full-length sequence | | ATGAAGACCTTACTCATCCTGACAATCCTTGCGATGGCAATAACCATCGGCACCGCCAAT |
| | (SEQ ID NO: 5) | | ATCCAGGTCGACCCTAGCGGCCAAGTACAATGGCTACAACAACAACTAGTCCCCCAGCTC |
| | | | CAACAGCCATTATCCCAGCAACCACAACAAACATTTCCCCAACCTCAACAAACATTCCCC |
| | | | CATCAACCACAACAACAAGTTCCCCAGCCTCAGCAACCACAACAACCATTTCTCCAGCCC |
| | | | CAACAACCATTCCCCCAACAACCACAACAACCATTCCCCCAGACTCAACAACCACAACAA |
| | | | CCATTTCCCCAGCAACCACAACAACCATTTCCCCAGACTCAACAACCCCAACAACCATTT |
| | | | CCCCAACAACCACAACAACCATTCCCCCAGACTCAACAACCCCAACAACCATTTCCCCAG |
| | | | CTCCAGCAACCACAACAACCTTTTCCCCAGCCCCAACAACAATTGCCGCAGCCCCAACAA |
| | | | CCGCAACAATCATTCCCCCAACAACAACGGCCATTCATTCAACCATCTCTACAACAACAG |
| | | | TTGAACCCATGCAAGAATATCCTCTTGCAACAATCGAAACCTGCGTCATTGGTGTCATCC |
| | | | CTCTGGTCAATAATCTGGCCACAAAGCGATTGCCAAGTGATGCGGCAACAATGCTGCCAA |
| | | | CAACTAGCACAGATTCCTCAACAGCTCCAGTGCGCAGCCATCCATAGCGTCGTGCATTCC |
| | | | ATCATCATGCAGCAGCAGCAGCAACAACAACAACAACAAGGCATCGATATCTTTCTGCCA |
| | | | CTATCTCAGCACGAACAGGTGGGTCAAGGTTCTCTAGTCCAGGGCCAGGGCATCATCCAA |
| | | | CCACAACAACCAGCTCAATTGGAGGCGATCAGATCATTGGTGTTGCAAACTCTTCCATCC |
| | | | ATGTGCAACGTGTATGTCCCACCTGAGTGCTCCATCATGAGGGCACCATTTGCCAGCATA |
| | | | GTCGCGGGCATTGGTGGCCAA |

MW;40kDa

| SPOT No. | | | (4) |
|---|---|---|---|
| protein | Isoelectric | Range | 5-11 |
| | point | Preferably | 5.5-10 |
| | | More | 6-9 |
| | | preferably | |
| | Molecular | Range | 10-80 |
| | weight | Preferably | 20-60 |
| | | More | 30-50 |
| | | preferably | |
| | Searched DB | | Uniprot |
| | Organism species | | Wheat (Triticum aestivum) |
| | accession No. | | W5CCA9 |
| | Protein name | | Fructose-bisphosphate aldolase |
| | Full-leneth sequence | | DELIKNAAYIGTPGKGILAADESTGTIGKREASINVENVEDNRRALRELLECTP |
| | (SEQ ID NO: 8) | | GALQYLSGVILFEETLYQSTKGGKPFVDILKAGNVLPGIKVDKGTIELAGTNGE |
| | | | TTTQGEDDLGKRCAKYYEAGAREAKWRAVLKIGATEPSQLSIDQNAQGLARY |
| | | | AIICQENGLVPIVEPEILVDGPHDIDRCAYVTEIVLAACYKALNDQHVLLEGTL |
| | | | LKPNMVTPGSDAKKVAPEVIAEYTVRTLQRTVPAAVPAIVELSGGQSEEEATL |
| | | | NLNAMNKLQTKKPWNLSESEGRALQQSTLKAWSGKTENEEKARTAELVRCK |
| | | | ANSEATLGTYKGDATLGEGASESLHVKDYKY |
| DNA | Searched DB | | GenBank |
| | accession No. | | KY930455.1 |
| | Full-length sequence | | gatgagctcatcaagaacgctgcctacattggcacccctggcaagggtatcctcgctgctgatgagtccaccggcaccatcggcaagcgcttcgccagcatcaat |
| | (SEQ ID NO: 7) | | gttgagaacgttgaggacaaccgccgtgccctccgtgagctcctcttctgcacccctggtgccctccagtacctcagcggtgtgatcctcttcgaggagaccctgt |
| | | | accagagcaccaagggtggcaagcccttcgtcgacatcctcaaggcgggcaatgtcctccccggaatcaaggtggacaagggtaccatcgagcttgctggaac |
| | | | caacggtgagaccaccacccagggattgatgaccttggcaagcgctgcgccaagtactatgaggctggtgcccgcttcgccaagtggcgtgcagtccttaaga |
| | | | tcggcgccaccgagccatcacagctctccatcgaccagaacgctcagggtctggctcgctatgccatcatctgccaggagaatgggctggtgcccattgttgagc |
| | | | ctgagatccttgagatggacctcatgacattgaccgctgtgcttacgtgactgagatcgtccttgctgcctgctacaaggccctcaacgaccagcatgtcctccttg |
| | | | agggcaccctcctgaagcccaacatggtcacccctggatccgacgccaagaaggtggcccctgaggtgattgctgagtacaccgtccgcaccctccagagga |
| | | | ccgtccctgctgccgtccccgccattgtcttcctctccggtggacagagtgaggaggaggcgaccctgaacctgaacgccatgaacaagctccagaccaagaa |
| | | | gccctggaacctgtccttctccttcgggcgtgccctccagcagagcaccctcaaggcctggtccggcaagacggagaacgaggagaaggccaggacggcgtt |
| | | | cctggtgaggtgcaaggccaactccgaggccaccatggcacctacaagggcgacgccaccatggcgagggcgcctctgagagcctccacgtcaaggacta |
| | | | caagtac |

mw;38kDa

| SPOT No. | | | (5) |
|---|---|---|---|
| protein | Isoelectric | Range | 5-11 |
| | point | Preferably | 6-10 |
| | | More | 7-9 |
| | | preferably | |
| | Molecular | Range | 10-80 |
| | weight | Preferably | 20-60 |
| | | More | 30-50 |
| | | preferably | |
| | Searched DB | | Uniprot |
| | Organism species | | Wheat (Triticum aestivum) |
| | accession No. | | Q1WA40 |
| | Protein name | | Alpha-gliadin Gli2-LM2-12 |
| | | | MKTFLILALLAIVATTATTAVRVPVPQLQPQNPSQQQPQEQVPLVQQQQFPGQ |
| | | | QQQFPPQQPYPQPQPFPSQQPYLQLQPFPQPQPFPPQLPYPQPQSFPPQQPYPQQ |
| | | | QPQYLQPQQPISQQQAQQQQQQQQQQQQQQQILQQILQQQLIPCRDVVLQQH |
| | | | NIAHASSQVLQQSTYQLLQQLCCQQLLQIPEQSRCQAIHNVAHAIIMHQQQQQ |
| | | | QQEQQQQLQQQQQQQLQQQRQQPSSQVSFQQPQQQYPSSQVSFQPSQLNPQA |
| | | | QGPVQPQQLPQFAEIRNLALQTLPAMCNVYIPPHCSTTIAPFGIFGTN |
| DNA | Searched DB | | EMBL-EBI |
| | accession No. | | ABD85198.1 |
| | Full-length sequence | | ATGAAGACCTTTCTCATCCTTGCCCTCCTTGCTATCGTGGCGACCACCGCCACAACTGCA |
| | (SEQ ID NO: 9) | | GTTAGAGTTCCAGTGCCACAATTGCAGCCACAAAATCCATCTCAGCAACAGCCACAAGAG |
| | | | CAAGTTCCATTGGTACAACAACAACAATTTCCAGGGCAGCAACAACAATTTCCACCACAA |
| | | | CAGCCATATCCGCAGCCGCAACCATTTCCATCACAACAACCATATCTGCAACTGCAGCCA |
| | | | TTTCCGCAGCCGCAACCATTTCCGCCACAACTACCATATCCGCAGCCGCAATCATTTCCA |
| | | | CCACAACAACCATATCCACAACAGCAACCACAGTATCTACAACCACAACAACCAATTTCG |
| | | | CAGCAACAAGCACAACAACAACAACAACAACAACAACAACAACAACAACAACAACAAATC |
| | | | CTTCAACAAATTTTGCAACAACAACTGATTCCATGCAGGGATGTTGTCTTGCAACAACAC |
| | | | AACATAGCGCATGCAAGCTCACAAGTTTTGCAACAAAGTACTTACCAGCTATTGCAACAA |
| | | | TTGTGTTGTCAACAACTGTTGCAGATCCCTGAGCAGTCGAGGTGCCAAGCCATCCATAAT |
| | | | GTTGCTCATGCTATTATTATGCATCAACAACAACAACAACAACAAGAACAACAACAACAG |
| | | | TTGCAACAACAACAACAGCAGCAACTGCAACAACAACGACAACAACCGTCGAGCCAGGTC |
| | | | TCCTTCCAACAGCCTCAGCAGCAATATCCATCAAGCCAGGTCTCCTTCCAGCCATCTCAG |
| | | | CTAAACCCACAGGCTCAGGGCCCCGTCCAACCTCAACAACTGCCCCAGTTCGCGGAAATA |
| | | | AGGAACCTAGCGCTACAGACGCTACCTGCAATGTGCAATGTCTACATCCCTCCACATTGC |
| | | | TCGACCACCATTGCGCCATTTGGCATCTTCGGTACCAAC |

MW;35kDa

| SPOT No. | | | (6) |
|---|---|---|---|
| protein | Isoelectric | Range | 5-11 |
| | point | Preferably | 5.5-10 |
| | | More | 6-9 |
| | | preferably | |
| | Molecular | Range | 10-80 |
| | weight | Preferably | 20-60 |
| | | More | 30-50 |
| | | preferably | |
| | Searched DB | | Uniprot |
| | Organism species | | Wheat (Triticum aestivum) |
| | accession No. | | A0A0E3Z522 |
| | Protein name | | Alpha-gliadin (Fragment) |
| | Full-length sequence | | MKTFLILALLAIVATTATVAVRVPVPQLQPQNPSQQQPQEQVPLVQQQQFPGQ |
| | (SEQ ID NO: 12) | | QQPFPPQQPYPQPQPFPSQQPYLQLQPFPQPQLPYPQPQPFRPQQPYPQPQPQY |
| | | | SQPQQPISQQQQQQQQQQQQQQQQQQQQPQQILQQILQQQLIPCMYVVLQQH |
| | | | SIAQGRSQVLQQSTYQLLQELCCQHLWQIPEQSQCQAIHNVVHAIILHQQQKQ |
| | | | QQQQQQQPSSQVSFQQPQQQYPLGQGSFRPSQQNPQAQGSVQPQQLPQFEEIR |
| | | | NLALQTLPAICNVYIPPYCTIAPFGIFGTN |
| DNA | Searched DB | | EMBL-EBI |
| | accession No. | | AKC91154.1 |
| | Full-length sequence | | ATGAAGACCTTTCTCATCCTTGCCCTCCTTGCTATTGTAGCAACCACCGCCACAGTTGCA |
| | (SEQ ID NO: 11) | | GTTAGAGTTCCAGTGCCACAATTGCAGCCACAAAATCCATCTCAGCAACAACCACAAGAG |
| | | | CAAGTTCCATTGGTACAACAACAGCAATTTCCAGGGCAGCAACAACCATTTCCACCACAA |
| | | | CAGCCATATCCGCAGCCGCAACCATTTCCATCACAACAACCATATCTGCAGCTGCAACCA |
| | | | TTTCCGCAGCCGCAACTACCATATCCGCAGCCGCAACCATTTCGACCACAACAACCATAT |
| | | | CCACAACCGCAACCACAGTATTCGCAACCACAACAACCAATTTCACAGCAGCAGCAGCAG |
| | | | CAGCAGCAGCAGCAACAACAACAACAACAACAACAACAACAACAACCACAACAAATCCTT |
| | | | CAACAAATTTTGCAACAACAACTGATTCCATGCATGTATGTTGTATTGCAGCAACACAGC |
| | | | ATAGCGCAAGGAAGATCACAAGTTTTGCAACAAAGTACTTACCAGCTGTTGCAAGAATTG |
| | | | TGTTGTCAGCACCTATGGCAGATCCCTGAGCAGTCGCAGTGCCAGGCCATCCACAATGTT |
| | | | GTTCATGCTATTATTCTGCATCAACAACAAAAACAACAACAACAACAACAACAACAACCA |
| | | | TCGAGTCAGGTCTCCTTCCAACAGCCTCAGCAACAATATCCATTAGGCCAGGGCTCCTTC |
| | | | CGGCCATCTCAGCAAAACCCACAGGCCCAGGGCTCTGTCCAGCCTCAACAACTGCCCCAG |
| | | | TTCGAGGAAATAAGGAACCTAGCGCTACAGACACTACCTGCAATTTGCAATGTCTACATC |
| | | | CCTCCATATTGCACCATCGCGCCATTTGGCATCTTCGGTACTAAC |

MW;45kDa

| SPOT No. | | | (7) |
|---|---|---|---|
| protein | Isoelectric | Range | 6-12 |
| | point | Preferably | 7-11 |
| | | More | 8-10 |
| | | preferably | |
| | Molecular | Range | 20-100 |
| | weight | Preferably | 25-80 |
| | | More | 30-70 |
| | | preferably | |
| | Searched DB | | Uniprot |
| | Organism species | | Wheat (Triticum aestivum) |
| | accession No. | | M9TG60 |
| | Protein name | | Gamma-gliadin 1 |
| | Full-length sequence | | MKTLLILTIIAVALTTTTANIQVDPSGQVQWPQQQQPFPQPQQPFSQQPQQIFP |
| | (SEQ ID NO: 14) | | QPQQTFPHQPQQAFPQPQQTFPHQPQQQFPQPQQPQQPFPQQPQQQFPQPQQP |
| | | | QQPFPQQPQQQFPQPQQPQQPFPQPQQPQLPFPQQPQQPFPQPQQPQQPFPQLQ |
| | | | QPQQPLPQPQQPQQPFPQQQQPLIQPYLQQQMNPCKNYLLQQCNPVSLVSSLV |
| | | | SMILPRSDCKVMRQQCCQQLAQIPQQLQCAAIHGIVHSIIMQQEQQQQQQQQ |
| | | | QQQQQQQGIQIMRPLFQLVQGQGIIQPQQPAQLEVIRSLVLGTLPTMCNVFVPP |
| | | | ECSTTKAPFASIVADIGGQ |
| DNA | Searched DB | | EMBL-EBI |
| | accession No. | | AGJ50340.1 |
| | Full-length sequence | | ATGAAGACCTTACTCATCCTGACAATCATTGCGGTGGCACTAACTACCACCACCGCCAAT |
| | (SEQ ID NO: 13) | | ATACAGGTCGACCCTAGTGGCCAAGTACAATGGCCACAACAACAACAACCATTCCCCCAG |
| | | | CCCCAACAACCATTCTCCCAACAACCACAACAAATTTTTCCCCAACCCCAACAAACATTC |
| | | | CCCCATCAACCACAACAAGCATTTCCCCAACCCCAACAAACATTCCCCCATCAACCACAA |
| | | | CAACAATTTCCCCAGCCCCAGCAACCACAACAACCATTTCCCCAGCAACCACAACAACAA |
| | | | TTTCCCCAGCCCCAACAACCACAACAACCATTTCCCCAGCAACCACAACAACAATTTCCC |
| | | | CAGCCCCAACAACCACAACAACCATTTCCCCAGCCCCAACAACCCCAACTACCATTTCCG |
| | | | CAACAACCACAACAACCATTCCCCCAGCCTCAACAACCCCAACAACCATTTCCCCAGTTA |
| | | | CAGCAACCACAACAACCTTTACCCCAGCCCCAACAACCGCAACAACCATTCCCCCAGCAA |
| | | | CAACAACCATTGATTCAGCCATACCTACAACAACAGATGAACCCCTGCAAGAATTACCTC |
| | | | TTGCAGCAATGCAACCCTGTGTCATTGGTGTCATCCCTCGTGTCAATGATCTTGCCACGA |
| | | | AGTGATTGCAAGGTGATGCGGCAACAATGTTGCCAACAACTAGCACAGATTCCTCAGCAG |
| | | | CTCCAGTGCGCAGCCATCCATGGCATCGTGCATTCCATCATCATGCAGCAAGAACAACAA |
| | | | CAACAACAACAACAACAACAACAACAACAACAACAACAAGGCATACAGATCATGCGGCCA |
| | | | CTATTTCAGCTCGTCCAGGGTCAGGGCATCATCCAACCTCAACAACCAGCTCAATTGGAG |
| | | | GTGATCAGGTCATTGGTATTGGGAACTCTTCCAACCATGTGCAACGTGTTTGTTCCACCT |
| | | | GAGTGCTCCACCACCAAGGCACCATTTGCCAGCATAGTCGCCGACATTGGTGGCCAA |

MW;35kDa

| SPOT No. | | | (8) |
|---|---|---|---|
| protein | Isoelectric | Range | 6-12 |
| | point | Preferably | 7-11 |
| | | More | 8-10 |
| | | preferably | |
| | Molecular | Range | 10-80 |
| | weight | Preferably | 20-60 |
| | | More | 30-50 |
| | | preferably | |
| | Searched DB | | Uniprot |
| | Organism species | | Wheat (Triticum aestivum) |
| | accession No. | | I0IT53 |
| | Protein name | | Alpha/beta-gliadin |
| | Full-length sequence | | MKTFLILALLAIVATTTTTAVRVPVPQLQPQNPSQQQPQEQVPLVQQQQFLGQ |
| | (SEQ ID NO: 16) | | QQQQFPGQQQPFPPQQPYPQPQPFLPQLPYPQPQPFPPQQSYPQPQPQYPQPQQ |
| | | | PISQQQAQLQQQQQQQQQQQQQILQQILQQQLIPCRDVVLQQPNIAHASSKVS |
| | | | QQSYQLLQQLCCLQLWQTPEQSRCQAIHNVIHAIILHHQQQQQQQQQQQQQQ |
| | | | QQPSSQVSYQQPQQQYPSGQGFFQPSQQNPQAQGFVQPQQLPQFEEIRNLALQ |
| | | | TLPAMCNVYIPPYCSTTIAPFGIMSTN |
| DNA | Searched DB | | EMBL-EBI |
| | accession No. | | ATL17022.1 |
| | Full-length sequence | | ATGAAGACCTTTCTCATCCTTGCCCTCCTTGCTATCGTGGCGACCACCACCACAACTGCA |
| | (SEQ ID NO: 15) | | GTTAGAGTTCCAGTGCCACAATTGCAGCCACAAAATCCATCTCAGCAACAACCACAAGAG |
| | | | CAAGTTCCATTGGTGCAACAACAACAATTTCTAGGGCAGCAACAACAACAATTTCCAGGG |
| | | | CAACAACAACCATTTCCACCACAACAGCCATATCCGCAGCCGCAACCATTTCTGCCACAA |
| | | | CTACCATATCCGCAGCCGCAACCATTTCCACCACAACAATCATATCCACAACCACAACCA |
| | | | CAATATCCGCAACCACAACAACCAATTTCGCAGCAACAAGCACAACTACAACAACAACAA |
| | | | CAACAACAACAACAACAACAACAACAAATCCTTCAACAAATTCTGCAACAACAACTGATT |
| | | | CCATGCAGGGATGTCGTCTTGCAACAACCCAATATAGCACATGCAAGCTCAAAAGTATCG |
| | | | CAACAAAGTTACCAACTGTTGCAACAATTATGTTGTCTGCAACTGTGGCAGACCCCCGAG |
| | | | CAGTCACGGTGCCAAGCCATCCACAATGTCATTCATGCTATTATTTTGCATCATCAACAA |
| | | | CAACAACAACAACAACAACAACAACAACAACAACAACAACAACCGTCGAGCCAGGTCTCC |
| | | | TACCAGCAGCCTCAGCAACAATATCCATCAGGCCAGGGCTTCTTCCAGCCATCTCAGCAA |
| | | | AACCCACAGGCCCAGGGCTTTGTCCAACCTCAGCAACTGCCGCAGTTCGAGGAAATAAGG |
| | | | AACCTAGCGCTGCAGACGCTACCAGCAATGTGCAATGTCTACATCCCTCCATATTGCTCG |
| | | | ACCACCATTGCGCCATTTGGCATCATGAGTACTAAC |

MW;45kDa

| SPOT No. | | | (9) |
|---|---|---|---|
| protein | Isoelectric | Range | 6-12 |
| | point | Preferably | 7-11 |
| | | More | 8-10 |
| | | preferably | |
| | Molecular | Range | 20-100 |
| | weight | Preferably | 25-80 |
| | | More | 30-70 |
| | | preferably | |
| | Searched DB | | Uniprot |
| | Organism species | | Wheat (Triticum aestivum) |
| | accession No. | | B2BZD1 |
| | Protein name | | LMW-GS |
| | Full-length sequence | | MKTFLIFALLAVAATSAIAQMETSHIPGLEKPSQQQPLPLQQILWYHQQQPIQQ |
| | (SEQ ID NO: 18) | | QPQPFPQQPPCSQQQQPPLSQQQQPPFSQQQPPFSQQELPILPQQPPFSQQQQPQ |
| | | | FSQQQQPFPQQQQPLLLQQPPFSQQRPPFSQQQQQPVLPQQPPFSQQQQQQPIL |
| | | | PQQPPFSQHQQPVLPQQQIPYVQPSILQQLNPCKVFLQQQCSPVAMPQSLARS |
| | | | QMLWQSSCHVMQQQCCQQLPRIPEQSRYDAIRAIIYSIVLQEQQHGQGFNQPQ |
| | | | QQQPQQSVQGVSQPQQQQKQLGQCSFQRPQQQQLGQWPQQQQVPQGTLLQP |
| | | | HQIAQLELMTSIALRTLPMMCSVNVPVYGTTTSVPFGVGTQVGAY |
| DNA | Searched DB | | EMBL-EBI |
| | accession No. | | ABY58134.1 |
| | Full-length sequence | | ATGAAGACCTTCCTCATCTTTGCCCTCCTTGCCGTTGCAGCGACAAGTGCCATTGCACAA |
| | (SEQ ID NO: 17) | | ATGGAGACTAGCCACATCCCTGGCTTGGAGAAACCATCGCAACAACAACCATTACCACTA |
| | | | CAACAAATATTATGGTACCACCAACAGCAACCGATCCAACAACAACCACAACCATTTCCA |
| | | | CAACAGCCACCATGTTCACAGCAACAACAACCACCATTATCGCAGCAACAACAACCACCA |
| | | | TTTTCACAGCAACAACCACCATTCTCGCAGCAAGAACTACCAATTCTACCGCAACAACCA |
| | | | CCATTTTCGCAGCAACAACAACCACAATTTTCGCAGCAACAACAACCATTCCCGCAGCAA |
| | | | CAACAACCACTTCTACTGCAACAACCCCCATTTTCACAACAACGACCACCATTTTCTCAG |
| | | | CAGCAGCAACAACCAGTTCTACCGCAACAACCACCATTTTCGCAACAGCAACAACAACAA |
| | | | CCAATTCTACCGCAACAACCACCTTTTTCGCAACACCAACAACCGGTTCTTCCGCAACAA |
| | | | CAAATACCATATGTTCAGCCATCTATCTTGCAGCAGCTAAACCCATGCAAGGTATTCCTC |
| | | | CAGCAGCAATGCAGCCCTGTGGCAATGCCACAAAGTCTTGCTAGGTCGCAAATGTTGTGG |
| | | | CAGAGCAGTTGCCATGTGATGCAGCAACAATGTTGCCAGCAGCTGCCGCGAATCCCCGAA |
| | | | CAATCACGCTATGATGCAATCCGTGCCATCATCTACTCGATCGTCCTACAAGAACAACAA |
| | | | CATGGTCAGGGTTTCAACCAACCTCAGCAGCAACAACCCCAACAGTCGGTCCAAGGTGTC |
| | | | TCCCAACCCCAACAACAACAGAAGCAGCTCGGACAGTGTTCTTTCCAACGACCTCAACAA |
| | | | CAACAACTGGGTCAATGGCCTCAACAACAACAGGTACCACAGGGTACCTTGTTGCAGCCA |
| | | | CACCAAATAGCTCAACTTGAGTTGATGACTTCCATTGCACTCCGTACCCTGCCAATGATG |
| | | | TGCAGTGTCAACGTGCCGGTGTACGGCACCACCACTAGTGTGCCATTCGGCGTTGGCACC |
| | | | CAAGTTGGTGCCTAC |

MW;55kDa

| SPOT No. | | | (10) |
|---|---|---|---|
| protein | Isoelectric | Range | 5-11 |
| | point | Preferably | 5.5-10 |
| | | More | 6-9 |
| | | preferably | |
| | Molecular | Range | 20-100 |
| | weight | Preferably | 25-80 |
| | | More | 30-70 |
| | | preferably | |
| | Searched DB | | Uniprot |
| | Organism species | | Wheat (Aegilops tauschii) |
| | accession No. | | M8B8C6 |
| | Protein name | | Globulin 1-S allele |
| | Full-lenah sequence | | MKSTVVRSPWLALALVLSLCLSLSFASWDAEDEGRGSRRWQEGGDERRSGES |
| | (SEQ ID NO: 20) | | GRPYHFGEESFREWAKSRHGHFKPSHYDADEIAFVREGEGVLVLLRNGKRES |
| | | | FCVREGDVEVIPAGSIVYSANTHRSKWERVVMLLNPVSTPGSFQEFSPIGEGGE |
| | | | QPQSFFSVESDEVIRAAFNTRQREDVDRVFETKSRGEGQISEGSEEQIRELSRSC |
| | | | SRGGRGGGGGSGSEKEDIQPRSLTGEKPRYSNKHGRFFIQITGDQCHHLRKLD |
| | | | MDVTLVNITRGSMTALRYTTRSTRIYIVVEGRDGYFEMACPHVSSSGRSERRE |
| | | | HEQEREREHGHGRRSEERGQEHGRRSEEEEHGHGGEQEKSRGYRQVRAQIKV |
| | | | GSVIVLPAGHPATEVAGNEGNLALLSEGVGANNDEEVEVTGGNSVLKQLDEA |
| | | | AKALAFPQQARELADRVIRAQPESVFVPGPQQQRRVADM |
| DNA | Searched DB | | EMBL-EBI |
| | accession No. | | EMT09885.1 |
| | Full-length sequence | | ATGAAGTCCACGGTAGTAAGATCGCCATGGCTAGCGCTAGCCCTCGTCCTCTCCCTGTGC |
| | (SEQ ID NO: 19) | | CTCTCCCTCTCGTTCGCGTCGTGGGATGCCGAGGACGAAGGTAGGGGTAGTAGGAGGTGG |
| | | | CAAGAAGGGGGCGACGAAAGGCGGTCCGGCGAAAGTGGCCGGCCGTACCACTTCGGCGAG |
| | | | GAGAGCTTCCGGGAGTGGGCCAAGTCGCGGCACGGCCACTTCAAGCCCAGCCACTACGAC |
| | | | GCCGACGAGATCGCCTTCGTGAGGGAAGGCGAGGGCGTGCTGGTGCTGCTGAGGAACGGG |
| | | | AAGCGGGAGTCGTTCTGCGTCAGGGAGGGCGACGTGTTCGTGATCCCGGCCGGGTCCATC |
| | | | GTGTACTCCGCCAACACGCACCGCTCCAAGTGGTTCCGGGTCGTCATGCTCCTCAACCCC |
| | | | GTCTCCACGCCGGGCAGCTTCCAGGAGTTCTCCCCTATTGGGTTTGGAGGCGAGCAGCCG |
| | | | CAGTCGTTCTTCAGCGTATTCAGCGACGAGGTTATCCGGGCGGCATTTAACACTCGGCAG |
| | | | CGGGAGGATGTGGACAGAGTGTTCGAGACGAAGAGCAGAGGTGAGGGTCAGATATCTGAG |
| | | | GGGTCGGAGGAGCAGATACGGGAGCTGAGCAGGTCGTGCTCCAGGGGAGGACGCGGCGGT |
| | | | GGCGGCGGGTCGGGTTCCGAGAAGGAGGACATCCAGCCGCGCAGCCTCACCGGCGAGAAG |
| | | | CCCCGCTACTCGAACAAGCACGGCAGGTTCCACCAGATCACCGGCGACCAGTGCCACCAC |
| | | | CTCCGCAAGCTCGACATGGATGTCACCCTCGTCAACATTACCCGGGGCTCGATGACGGCG |
| | | | CTGAGGTACACCACCCGGTCGACCAGGATCTACATCGTCGTGGAGGGGCGCGACGGCTAC |
| | | | TTCGAGATGGCGTGCCCGCACGTCTCCAGCTCCGGCCGTTCTGAACGCCGGGAGCACGAG |
| | | | CAGGAGCGCGAGCGCGAACACGGACACGGCAGGAGAAGCGAGGAGCGCGGGCAGGAGCAC |
| | | | GGCAGGAGGAGCGAGGAGGAGGAGCACGGCCACGGCGGCGAGCAGGAGAAATCGAGGGGC |
| | | | TACAGGCAGGTGAGGGCCCAGATCAAGGTGGGGTCGGTGATCGTGCTCCCCGCGGGCCAC |
| | | | CCGGCGACGTTCGTGGCCGGGAACGAGGGGAACCTCGCCCTGCTGTCCTTCGGCGTGGGC |
| | | | GCCAACAACGACGAGGAGGTGTTCGTGACCGGCGGGAACAGCGTGCTGAAGCAGCTGGAC |
| | | | GAGGCAGCCAAGGCGCTGGCGTTCCCCCAGCAGGCGAGGGAGCTGGCGGACAGGGTCATC |
| | | | CGCGCGCAGCCGGAGTCCGTGTTCGTCCCCGGCCCGCAGCAGCAGCGCCGCGTCGCCGAC |
| | | | ATG |

MW;55kDa

| SPOT No. | | | (11) (12) |
|---|---|---|---|
| protein | Isoelectric | Range | 5-12 |
| | point | Preferably | 5.5-11 |
| | | More | 7-10 |
| | | preferably | |
| | Molecular | Range | 20-100 |
| | weight | Preferably | 25-80 |
| | | More | 30-70 |
| | | preferably | |
| | Searched DB | | Uniprot |
| | Organism species | | Wheat (Triticum aestivum) |
| | accession No. | | B7U6L4 |
| | Protein name | | Globulin 3 |
| | Full-length sequence | | MATRARVTIPLLELLGTSLLFAAAVSASHDEEEDRRGGRSLQQCVQRCQQDRP |
| | (SEQ ID NO: 22) | | RYSHARCVQECRDDQQQHGRHEQEEQGRGHGRHGEGEREEEQGRGRGRHG |
| | | | QGEREEEQGRGRGRRGEGERDEEHGDGRRPYVEGPRSERRIIRSDHGEVKALR |
| | | | PFDEVSRLLRGIRNYRVAIMEVNPRAFVVPGLTDADGVGYVAQGEGVLTVIE |
| | | | NGEKRSYTVRQGDVIVAPAGSIMHLANTDGRRKLVIAKILHTISVPGKFQYFS |
| | | | AKPLLASLSKRVLTAALKTSDERLGSLLGSRQGKEEEEKSISIVRASEEQLREL |
| | | | RRQASEGDQGHHWPLPPERGDSRDTENLLEQRPKIANRHGRLYEADARSFHA |
| | | | LAQHDVRVAVANITPGSMTAPYLNTQSFKLAVVLEGEGEVEIVCPHLGRDSE |
| | | | RREQEHGKGRWRSEEEEDDRRQQRRRGSGSESEEEQDQQRYETVRARVSRGS |
| | | | AFVVPPGHPVVEIASSRGSSNLQVVCFE1NAERNERVWLAGRNNVIAKLDDPA |
| | | | QELTFGRPAREVQEVFRAKDQQDEGFVAGPEQQQEHERGDRRRGDRGRGDE |
| | | | AVEAFLRMATAAL |
| DNA | Searched DB | | EMBL-EBI |
| | accession No. | | ACJ65514.1 |
| | Full-length sequence | | ATGGCGACCAGAGCCAGAGTAACCATCCCTCTCCTCTTCCTCCTGGGCACAAGCCTTCTC |
| | (SEQ ID NO: 21) | | TTCGCCGCGGCTGTTTCGGCCTCCCATGACGAGGAGGAGGACAGGCGCGGTGGGCGCTCG |
| | | | CTGCAGCAGTGCGTGCAGCGGTGCCAGCAGGACCGGCCGCGGTACTCTCATGCCCGGTGC |
| | | | GTGCAGGAGTGCCGGGACGACCAGCAGCAGCACGGAAGGCACGAGCAGGAGGAGCAGGGC |
| | | | CGCGGGCATGGCCGGCACGGCGAGGGGGAGCGTGAGGAGGAGCAGGGCCGTGGCCGTGGC |
| | | | CGGCACGGCCAGGGAGAGCGTGAGGAGGAGCAGGGCCGTGGACGTGGGCGGCGCGGCGAG |
| | | | GGAGAGCGTGATGAGGAGCACGGGGATGGCCGGCGGCCGTACGTGTTCGGCCCGCGCAGC |
| | | | TTCCGCCGCATCATCCGGAGCGACCACGGGTTCGTCAAGGCCCTTCGCCCGTTCGACGAA |
| | | | GTGTCCAGGCTCCTCCGGGGCATCAGGAACTACCGTGTCGCCATCATGGAGGTGAACCCG |
| | | | CGCGCGTTCGTCGTGCCGGGACTCACGGACGCGGACGGCGTCGGCTACGTCGCTCAAGGC |
| | | | GAGGGGGTGCTGACGGTGATCGAGAACGGCGAGAAGCGGTCCTACACCGTCAGGCAAGGC |
| | | | GATGTGATCGTGGCGCCGGCGGGGTCCATCATGCACCTGGCCAACACCGACGGCCGGAGG |
| | | | AAGCTGGTCATCGCCAAGATTCTCCACACCATCTCCGTCCCCGGCAAGTTCCAGTATTTC |
| | | | TCGGCCAAGCCTCTCCTCGCTAGTTTGAGCAAACGCGTGCTCACAGCGGCGTTAAAGACC |
| | | | TCGGATGAGCGGCTGGGTAGTCTCTTGGGCAGCCGCCAAGGCAAGGAGGAGGAGGAGAAG |
| | | | TCCATCTCCATCGTCCGCGCGTCAGAGGAGCAGCTCCGCGAGCTGCGTCGCCAGGCGTCC |
| | | | GAGGGTGACCAGGGCCACCACTGGCCTCTCCCCCCGTTCCGCGGCGACTCGCGCGACACC |
| | | | TTCAACCTCCTGGAGCAGCGCCCCAAGATCGCCAACCGCCATGGCCGCCTCTACGAGGCC |
| | | | GACGCCCGTAGCTTCCACGCCCTCGCCCAACACGACGTCCGCGTCGCCGTGGCCAACATC |
| | | | ACGCCGGGTTCTATGACCGCACCCTACCTGAACACCCAGTCGTTCAAGCTCGCCGTTGTG |
| | | | CTGGAAGGCGAGGGCGAGGTGGAGATCGTCTGCCCGCACCTCGGCCGCGACAGCGAGCGC |
| | | | CGCGAGCAAGAGCACGGCAAGGGCAGGTGGAGGAGCGAGGAAGAGGAGGACGACCGGCGG |
| | | | CAGCAACGCCGACGCGGGTCCGGCTCCGAGTCGGAGGAGGAGCAGGACCAGCAGAGGTAC |
| | | | GAGACGGTCCGCGCGCGGGTGTCGCGCGGCTCGGCGTTCGTGGTGCCCCCCGGCCACCCG |
| | | | GTGGTGGAGATCGCCTCGTCCCGCGGCAGCAGCAACCTCCAGGTGGTGTGCTTCGAGATC |
| | | | AACGCCGAGAGGAACGAGCGGGTGTGGCTCGCCGGGAGGAACAACGTGATCGCCAAGCTG |
| | | | GACGACCCCGCCCAGGAGCTCACCTTCGGCAGGCCCGCGAGGGAGGTGCAGGAGGTGTTC |
| | | | CGCGCCAAGGATCAGCAGGACGAGGGCTTCGTCGCCGGACCCGAGCAGCAGCAGGAGCAT |
| | | | GAGCGCGGGGACCGCCGCCGTGGTGACCGCGGGCGCGGCGACGAAGCCGTGGAGGCGTTC |
| | | | CTGAGGATGGCAACCGCCGCGCTC |

MW;55kDa

| SPOT No. | | | (13) |
|---|---|---|---|
| protein | Isoelectric | Range | 6-12 |
| | point | Preferably | 7-11 |
| | | More | 8-10 |
| | | preferably | |
| | Molecular | Range | 20-100 |
| | weight | Preferably | 25-80 |
| | | More | 30-70 |
| | | preferably | |
| | Searched DB | | Uniprot |
| | Organism species | | Wheat (Triticum aestivum) |
| | accession No. | | Q03033 |
| | Protein name | | Elongation Factor 1-alpha |
| | Full-length sequence | | MGKEKTHINIVVIGHVDSGKSTTTGHLIYKLGGIDKRVIERFEKEAAEMNKRSF |
| | (SEQ ID NO: 24) | | KYAWVLDKLKAERERGITIDIALWKFETTKYYCTVIDAPGHRDFIKNMITGTS |
| | | | QADCAVLIIDSTTGGFEAGISKDGQTREHALLAFTLGVKQMICCCNKMDATTP |
| | | | KYSKARYEEIVKEVSSYLKKVGYNPDKVPFVPISGFEGDNMIERSTNLDWYK |
| | | | GPTLLEALDQINEPKRPSDKPLRLPLQDVYKIGGIGTVPVGRVETGVIKPGMVV |
| | | | TFGPTGLTTEVKSVEMHHESLLEALPGDNVGFNVKNVAVKDLKRGFVASNSK |
| | | | DDPAKEAANFTSQVIIMNHPGQIGNGYAPVLDCHTSHIAVKFAELVTKIDRRS |
| | | | GKELEALPKFLKNGDAGIVKMIPTKPMVVETFATYPPLGRFAVRDMRQTVAV |
| | | | GVIKGVEKKDPTGAKVTKAAIKKK |
| DNA | Searched DB | | EMBL-EBI |
| | accession No. | | AAA34306.1 |
| | Full-length sequence | | ATGGGTAAGGAGAAGACTCACATCAACATCGTGGTCATTGGCCATGTCGACTCTGGCAAG |
| | (SEQ ID NO: 23) | | TCGACGACCACTGGCCACCTGATCTACAAGCTTGGAGGCATTGACAAGCGTGTCATCGAG |
| | | | AGGTTCGAGAAGGAAGCCGCTGAGATGAACAAGAGGTCTTTCAAGTACGCGTGGGTGCTT |
| | | | GACAAGCTCAAGGCCGAGCGTGAGAGAGGTATCACCATCGATATTGCTCTCTGGAAGTTC |
| | | | GAGACCACCAAGTACTACTGCACCGTCATTGATGCCCCTGGTCACCGTGACTTCATCAAG |
| | | | AACATGATCACCGGTACCTCCCAGGCTGACTGTGCTGTTCTCATCATCGACTCCACCACT |
| | | | GGTGGTTTTGAGGCTGGTATCTCCAAGGATGGCCAGACACGTGAGCACGCCCTCCTTGCT |
| | | | TTCACTCTTGGAGTGAAGCAGATGATCTGCTGCTGCAACAAGATGGACGCCACCACTCCC |
| | | | AAGTACTCAAAGGCGCGTTATGAAGAAATTGTCAAGGAGGTCTCTTCCTACCTGAAGAAG |
| | | | GTCGGCTACAACCCTGACAAGGTTCCCTTCGTCCCCATCTCTGGGTTTGAGGGTGACAAC |
| | | | ATGATTGAGAGGTCCACCAACCTTGACTGGTACAAGGGCCCAACCCTTCTTGAGGCGCTT |
| | | | GACCAGATCAACGAGCCCAAGAGGCCCTCAGACAAGCCCCTCCGTCTTCCCCTCCAGGAC |
| | | | GTTTACAAGATTGGTGGCATTGGAACTGTGCCTGTTGGCCGTGTTGAGACTGGTGTCATC |
| | | | AAGCCTGGTATGGTTGTCACCTTTGGTCCCACTGGTCTGACAACTGAGGTCAAGTCCGTT |
| | | | GAGATGCACCATGAGTCTCTCCTGGAGGCGCTTCCTGGTGACAACGTTGGCTTCAATGTC |
| | | | AAGAATGTTGCCGTGAAGGATCTGAAGCGTGGTTTTGTTGCATCCAACTCCAAGGATGAC |
| | | | CCTGCCAAGGAGGCAGCCAACTTCACCTCCCAGGTCATCATCATGAACCACCCTGGTCAG |
| | | | ATTGGCAACGGCTACGCCCCAGTGCTGGACTGCCACACCTCGCACATTGCTGTCAAGTTT |
| | | | GCTGAGCTGGTGACCAAGATCGACAGGCGATCTGGTAAGGAGCTGGAGGCCCTGCCCAAG |
| | | | TTCCTCAAGAATGGTGATGCTGGCATAGTGAAGATGATTCCCACCAAGCCCATGGTTGTG |
| | | | GAGACCTTTGCTACTTACCCACCTCTTGGTCGTTTTGCTGTCCGTGACATGAGGCAAACT |
| | | | GTGGCTGTTGGTGTCATCAAGGGTGTGGAGAAGAAGGACCCAACCGGCGCCAAGGTGACC |
| | | | AAGGCTGCCATCAAGAAGAAA |

MW;35kDa

| SPOT No. | | | (14) |
|---|---|---|---|
| protein | Isoelectric | Range | 5-11 |
| | point | Preferably | 5.5-10 |
| | | More | 6-9 |
| | | preferably | |
| | Molecular | Range | 10-80 |
| | weight | Preferably | 20-60 |
| | | More | 30-50 |
| | | preferably | |
| | Searched DB | | Uniprot |
| | Organism species | | Wheat (Triticum aestivum) |
| | accession No. | | A0A0E3UR64 |
| | Protein name | | Alpha-gliadin (Fragment) |
| | Full-length sequence | | MKTFLILALLAIVATTATTAVRVPVPQLQPQNPSQQQPQEQVPLVQQQQFLGQ |
| | (SEQ ID NO: 26) | | QQPFPPQQPYPQPQPFPSQQPYLQLQPFPQPQLPYSQPQPFRPQQPYPQPQPQY |
| | | | SQPQQPISQQQQQQQQQQQQQILQQILQQQLIPCRDVVLQQHNIAHASSQVLQ |
| | | | QSSYQQLQQLCCQQLFQIPEQSRCQAIHNVVHAIILHHHQQQQQQPSSQVSYQ |
| | | | QPQEQYPSGQGSFQSSQQNPQAQGSVQPQQLPQFQEIRNLALQTLPAMCNVYI |
| | | | PPYCSTTIAPFGIFGTN |
| DNA | Searched DB | | EMBL-EBI |
| | accession No. | | AKC91122.1 |
| | Full-length sequence | | ATGAAGACCTTTCTCATCCTTGCCCTCCTTGCTATCGTGGCGACCACCGCCACAACTGCA |
| | (SEQ ID NO: 25) | | GTTAGAGTTCCAGTGCCACAATTGCAGCCACAAAATCCATCTCAGCAACAGCCACAAGAG |
| | | | CAAGTTCCATTGGTACAACAACAACAATTTCTAGGGCAGCAACAACCATTTCCACCACAA |
| | | | CAACCATATCCACAGCCGCAACCATTTCCATCACAACAACCATATCTGCAGCTGCAACCA |
| | | | TTTCCGCAGCCGCAACTACCATATTCGCAGCCACAACCATTTCGACCACAACAACCATAT |
| | | | CCACAACCGCAACCACAGTATTCGCAACCACAACAACCAATTTCACAGCAGCAGCAGCAG |
| | | | CAGCAACAACAACAACAACAACAAATCCTTCAACAAATTCTGCAACAACAACTGATTCCA |
| | | | TGCAGGGATGTTGTCTTGCAACAACACAACATAGCGCATGCAAGCTCACAAGTATTGCAA |
| | | | CAAAGTAGTTACCAACAGTTGCAACAATTATGTTGTCAGCAACTGTTTCAGATCCCCGAG |
| | | | CAGTCGCGGTGCCAAGCCATCCACAATGTTGTTCATGCTATTATTCTGCATCATCATCAA |
| | | | CAACAACAACAACAACCGTCGAGCCAGGTCTCCTACCAGCAGCCTCAGGAACAATATCCA |
| | | | TCAGGCCAGGGCTCCTTCCAGTCATCTCAGCAAAACCCACAGGCCCAGGGCTCTGTCCAG |
| | | | CCTCAACAACTGCCCCAGTTCCAGGAAATAAGGAACTTAGCGCTGCAGACGCTGCCAGCA |
| | | | ATGTGCAATGTCTACATCCCTCCATATTGCTCGACCACCATTGCGCCATTTGGCATCTTC |
| | | | GGTACCAAC |

MW;40kDa

| SPO SPOT No. | | | (15) (16) |
|---|---|---|---|
| protein | Isoelectric | Range | 5-11 |
| protein | point | Preferably | 5.5-10 |
| | | More | 6-9 |
| | | preferably | |
| | Molecular | Range | 10-80 |
| | weight | Preferably | 20-60 |
| | | More | 30-50 |
| | | preferably | |
| | Searched DB | | Uniprot |
| | Organism species | | Wheat (Triticum aestivum) |
| | accession No. | | I7KM78 |
| | Protein name | | Gamma-gliadin |
| | Full-length sequence | | MKIFMVFALLVASTTITTATAQLDPRIHDQERPQQSFLQQQPLIQQQPYPPQEP |
| | (SEQ ID NO: 28) | | QQPLFPQKEPQQPFPLQQPQYQQQQPYPQQPLPQEQLPQQHLFPQQPPQQQFP |
| | | | QQMPLPHQQQTFPQQQQQQQQQEQLPQQLPQFPQQQPFSQYQQPLTQQPYSQ |
| | | | EQPLPQQQPSVEEKQQLNLCKEELLQQCNPEEKLSLLQSVIPFLRPKTSQQNSC |
| | | | QLKRLQCCRQLAHISEPSRCPAIHNIVHAIVMQQQHVDRGEGQPQPQQLGQE |
| | | | MPMQPQHQLGQHSILPQQLAQYKLVRLLVIQTLPMLCNVHVPSDCYTITAPFG |
| | | | SMTAYNGGQ |
| DNA | Searched DB | | EMBL-EBI |
| DNA | accession No. | | CCH80658.1 |
| | Full-length sequence | | ATGAAGATCTTCATGGTCTTTGCCCTCCTCGTTGCATCAACGACCATCACCACCGCGACC |
| | (SEQ ID NO: 27) | | GCACAGCTCGACCCTCGCATCCATGACCAAGAAAGGCCACAACAATCGTTTCTGCAACAG |
| | | | CAACCACTTATCCAGCAACAACCATACCCGCCTCAAGAGCCACAACAACCACTATTCCCG |
| | | | CAAAAAGAGCCACAACAACCATTTCCGCTGCAGCAGCCACAATACCAGCAACAACAACCG |
| | | | TATCCACAACAACCACTTCCCCAAGAACAACTTCCCCAGCAACATTTATTTCCGCAGCAG |
| | | | CCGCCACAACAACAATTTCCACAACAGATGCCACTTCCGCATCAACAACAAACATTCCCG |
| | | | CAACAACAACAACAACAACAACAACAAGAACAACTCCCACAACAACTCCCACAATTCCCG |
| | | | CAACAACAACCATTTTCCCAATATCAACAACCATTAACACAACAACCATACTCGCAAGAG |
| | | | CAACCATTGCCACAACAACAACCTTCTGTAGAGGAAAAACAACAATTGAACTTGTGCAAG |
| | | | GAGTTCCTCCTGCAGCAGTGTAACCCAGAGGAGAAACTGTCGTTACTCCAGTCAGTGATC |
| | | | CCGTTCCTCCGACCAAAGACCTCGCAACAGAACAGCTGCCAGTTGAAGCGACTACAATGT |
| | | | TGTCGACAACTTGCACATATCAGTGAACCGTCCCGATGCCCGGCCATCCACAACATTGTG |
| | | | CATGCCATCGTCATGCAACAACAACATGTGGATAGAGGTTTCGGCCAGCCTCAACCACAA |
| | | | CAGTTGGGCCAGGAAATGCCCATGCAGCCTCAACATCAATTGGGCCAGCACTCTATCCTA |
| | | | CCTCAACAACTAGCCCAGTACAAGTTGGTTAGGTTACTTGTGATTCAGACCCTTCCTATG |
| | | | TTATGCAACGTGCATGTCCCGTCTGATTGCTACACCATTACTGCACCATTTGGTAGCATG |
| | | | ACTGCCTACAATGGTGGACAA |

[0107] Spots 11 and 12 or spots 15 and 16 are derived from the same protein, and a total of 14 types of proteins from (1) to (14) were identified as novel antigens derived from wheat.

[0108] The antigen in spot 1 in the present invention is not limited and can be any of the proteins as defined below in (1-a) to (1-f).

[0109] (1-a) a protein comprising the amino acid sequence of SEQ ID NO: 2;

[0110] (1-b) a protein comprising an amino acid sequence with deletion, substitution, insertion or addition of one or several amino acids in SEQ ID NO: 2;

[0111] (1-c) a protein comprising an amino acid sequence having at least 70% identity to the amino acid sequence of SEQ ID NO: 2;

[0112] (1-d) a protein comprising an amino acid sequence encoded by a nucleotide sequence with deletion, substitution, insertion or addition of one or several nucleotides in SEQ ID NO: 1;

[0113] (1-e) a protein comprising an amino acid sequence encoded by a nucleotide sequence having at least 70% identity to the nucleotide sequence of SEQ ID NO: 1; and

[0114] (1-f) a protein comprising an amino acid sequence encoded by a nucleic acid that hybridizes under stringent conditions with a nucleic acid having a nucleotide sequence complementary to the nucleotide sequence of SEQ ID NO: 1.

[0115] (2-a) a protein comprising the amino acid sequence of SEQ ID NO: 4;

[0116] (2-b) a protein comprising an amino acid sequence with deletion, substitution, insertion or addition of one or several amino acids in SEQ ID NO: 4;

[0117] (2-c) a protein comprising an amino acid sequence having at least 70% identity to the amino acid sequence of SEQ ID NO: 4;

[0118] (2-d) a protein comprising an amino acid sequence encoded by a nucleotide sequence with deletion, substitution, insertion or addition of one or several nucleotides in SEQ ID NO: 3;

[0119] (2-e) a protein comprising an amino acid sequence encoded by a nucleotide sequence having at least 70% identity to the nucleotide sequence of SEQ ID NO: 3; and

[0120] (2-f) a protein comprising an amino acid sequence encoded by a nucleic acid that hybridizes under stringent conditions with a nucleic acid having a nucleotide sequence complementary to the nucleotide sequence of SEQ ID NO: 3.

[0121] (3-a) a protein comprising the amino acid sequence of SEQ ID NO: 6;

[0122] (3-b) a protein comprising an amino acid sequence with deletion, substitution, insertion or addition of one or several amino acids in SEQ ID NO: 6;

[0123] (3-c) a protein comprising an amino acid sequence having at least 70% identity to the amino acid sequence of SEQ ID NO: 6;

[0124] (3-d) a protein comprising an amino acid sequence encoded by a nucleotide sequence with deletion, substitution, insertion or addition of one or several nucleotides in SEQ ID NO: 5;

[0125] (3-e) a protein comprising an amino acid sequence encoded by a nucleotide sequence having at least 70% identity to the nucleotide sequence of SEQ ID NO: 5; and

[0126] (3-f) a protein comprising an amino acid sequence encoded by a nucleic acid that hybridizes under stringent conditions with a nucleic acid having a nucleotide sequence complementary to the nucleotide sequence of SEQ ID NO: 5.

[0127] (4-a) a protein comprising the amino acid sequence of SEQ ID NO: 8;

[0128] (4-b) a protein comprising an amino acid sequence with deletion, substitution, insertion or addition of one or several amino acids in SEQ ID NO: 8;

[0129] (4-c) a protein comprising an amino acid sequence having at least 70% identity to the amino acid sequence of SEQ ID NO: 8;

[0130] (4-d) a protein comprising an amino acid sequence encoded by a nucleotide sequence with deletion, substitution, insertion or addition of one or several nucleotides in SEQ ID NO: 9;

[0131] (4-e) a protein comprising an amino acid sequence encoded by a nucleotide sequence having at least 70% identity to the nucleotide sequence of SEQ ID NO: 9; and

[0132] (4-f) a protein comprising an amino acid sequence encoded by a nucleic acid that hybridizes under stringent conditions with a nucleic acid having a nucleotide sequence complementary to the nucleotide sequence of SEQ ID NO: 9.

[0133] (5-a) a protein comprising the amino acid sequence of SEQ ID NO: 10;

[0134] (5-b) a protein comprising an amino acid sequence with deletion, substitution, insertion or addition of one or several amino acids in SEQ ID NO: 10;

[0135] (5-c) a protein comprising an amino acid sequence having at least 70% identity to the amino acid sequence of SEQ ID NO: 10;

[0136] (5-d) a protein comprising an amino acid sequence encoded by a nucleotide sequence with deletion, substitution, insertion or addition of one or several nucleotides in SEQ ID NO: 9;

[0137] (5-e) a protein comprising an amino acid sequence encoded by a nucleotide sequence having at least 70% identity to the nucleotide sequence of SEQ ID NO: 9; and

[0138] (5-f) a protein comprising an amino acid sequence encoded by a nucleic acid that hybridizes under stringent conditions with a nucleic acid having a nucleotide sequence complementary to the nucleotide sequence of SEQ ID NO: 9.

[0139] (6-a) a protein comprising the amino acid sequence of SEQ ID NO: 12;

[0140] (6-b) a protein comprising an amino acid sequence with deletion, substitution, insertion or addition of one or several amino acids in SEQ ID NO: 12;

[0141] (6-c) a protein comprising an amino acid sequence having at least 70% identity to the amino acid sequence of SEQ ID NO: 12;

[0142] (6-d) a protein comprising an amino acid sequence encoded by a nucleotide sequence with deletion, substitution, insertion or addition of one or several nucleotides in SEQ ID NO: 11;

[0143] (6-e) a protein comprising an amino acid sequence encoded by a nucleotide sequence having at least 70% identity to the nucleotide sequence of SEQ ID NO: 11; and

[0144] (6-f) a protein comprising an amino acid sequence encoded by a nucleic acid that hybridizes under stringent conditions with a nucleic acid having a nucleotide sequence complementary to the nucleotide sequence of SEQ ID NO: 11.

[0145] (7-a) a protein comprising the amino acid sequence of SEQ ID NO: 14;

[0146] (7-b) a protein comprising an amino acid sequence with deletion, substitution, insertion or addition of one or several amino acids in SEQ ID NO: 14;

[0147] (7-c) a protein comprising an amino acid sequence having at least 70% identity to the amino acid sequence of SEQ ID NO: 14;

[0148] (7-d) a protein comprising an amino acid sequence encoded by a nucleotide sequence with deletion, substitution, insertion or addition of one or several nucleotides in SEQ ID NO: 13;

[0149] (7-e) a protein comprising an amino acid sequence encoded by a nucleotide sequence having at least 70% identity to the nucleotide sequence of SEQ ID NO: 13; and

[0150] (7-f) a protein comprising an amino acid sequence encoded by a nucleic acid that hybridizes under stringent conditions with a nucleic acid having a nucleotide sequence complementary to the nucleotide sequence of SEQ ID NO: 13.

[0151] (8-a) a protein comprising the amino acid sequence of SEQ ID NO: 16;

[0152] (8-b) a protein comprising an amino acid sequence with deletion, substitution, insertion or addition of one or several amino acids in SEQ ID NO: 16;

[0153] (8-c) a protein comprising an amino acid sequence having at least 70% identity to the amino acid sequence of SEQ ID NO: 16;

[0154] (8-d) a protein comprising an amino acid sequence encoded by a nucleotide sequence with deletion, substitution, insertion or addition of one or several nucleotides in SEQ ID NO: 15;

[0155] (8-e) a protein comprising an amino acid sequence encoded by a nucleotide sequence having at least 70% identity to the nucleotide sequence of SEQ ID NO: 15; and

[0156] (8-f) a protein comprising an amino acid sequence encoded by a nucleic acid that hybridizes under stringent conditions with a nucleic acid having a nucleotide sequence complementary to the nucleotide sequence of SEQ ID NO: 15.

[0157] (9-a) a protein comprising the amino acid sequence of SEQ ID NO: 18;

[0158] (9-b) a protein comprising an amino acid sequence with deletion, substitution, insertion or addition of one or several amino acids in SEQ ID NO: 18;

[0159] (9-c) a protein comprising an amino acid sequence having at least 70% identity to the amino acid sequence of SEQ ID NO: 18;

[0160] (9-d) a protein comprising an amino acid sequence encoded by a nucleotide sequence with deletion, substitution, insertion or addition of one or several nucleotides in SEQ ID NO: 17;

[0161] (9-e) a protein comprising an amino acid sequence encoded by a nucleotide sequence having at least 70% identity to the nucleotide sequence of SEQ ID NO: 17; and

[0162] (9-f) a protein comprising an amino acid sequence encoded by a nucleic acid that hybridizes under stringent conditions with a nucleic acid having a nucleotide sequence complementary to the nucleotide sequence of SEQ ID NO: 17.

[0163] (10-a) a protein comprising the amino acid sequence of SEQ ID NO: 20;

[0164] (10-b) a protein comprising an amino acid sequence with deletion, substitution, insertion or addition of one or several amino acids in SEQ ID NO: 20;

[0165] (10-c) a protein comprising an amino acid sequence having at least 70% identity to the amino acid sequence of SEQ ID NO: 20;

[0166] (10-d) a protein comprising an amino acid sequence encoded by a nucleotide sequence with deletion, substitution, insertion or addition of one or several nucleotides in SEQ ID NO: 19;

[0167] (10-e) a protein comprising an amino acid sequence encoded by a nucleotide sequence having at least 70% identity to the nucleotide sequence of SEQ ID NO: 19; and

[0168] (10-f) a protein comprising an amino acid sequence encoded by a nucleic acid that hybridizes under stringent conditions with a nucleic acid having a nucleotide sequence complementary to the nucleotide sequence of SEQ ID NO: 19.

[0169] (11-a) a protein comprising the amino acid sequence of SEQ ID NO: 22;

[0170] (11-b) a protein comprising an amino acid sequence with deletion, substitution, insertion or addition of one or several amino acids in SEQ ID NO: 22;

[0171] (11-c) a protein comprising an amino acid sequence having at least 70% identity to the amino acid sequence of SEQ ID NO: 22;

[0172] (11-d) a protein comprising an amino acid sequence encoded by a nucleotide sequence with deletion, substitution, insertion or addition of one or several nucleotides in SEQ ID NO: 21;

[0173] (11-e) a protein comprising an amino acid sequence encoded by a nucleotide sequence having at least 70% identity to the nucleotide sequence of SEQ ID NO: 21; and

[0174] (11-f) a protein comprising an amino acid sequence encoded by a nucleic acid that hybridizes under stringent conditions with a nucleic acid having a nucleotide sequence complementary to the nucleotide sequence of SEQ ID NO: 21.

[0175] (12-a) a protein comprising the amino acid sequence of SEQ ID NO: 24;

[0176] (12-b) a protein comprising an amino acid sequence with deletion, substitution, insertion or addition of one or several amino acids in SEQ ID NO: 24;

[0177] (12-c) a protein comprising an amino acid sequence having at least 70% identity to the amino acid sequence of SEQ ID NO: 24;

[0178] (12-d) a protein comprising an amino acid sequence encoded by a nucleotide sequence with deletion, substitution, insertion or addition of one or several nucleotides in SEQ ID NO: 23;

[0179] (12-e) a protein comprising an amino acid sequence encoded by a nucleotide sequence having at least 70% identity to the nucleotide sequence of SEQ ID NO: 23; and

[0180] (12-f) a protein comprising an amino acid sequence encoded by a nucleic acid that hybridizes under stringent conditions with a nucleic acid having a nucleotide sequence complementary to the nucleotide sequence of SEQ ID NO: 23.

[0181] (13-a) a protein comprising the amino acid sequence of SEQ ID NO: 26;

[0182] (13-b) a protein comprising an amino acid sequence with deletion, substitution, insertion or addition of one or several amino acids in SEQ ID NO: 26;

[0183] (13-c) a protein comprising an amino acid sequence having at least 70% identity to the amino acid sequence of SEQ ID NO: 26;

[0184] (13-d) a protein comprising an amino acid sequence encoded by a nucleotide sequence with deletion, substitution, insertion or addition of one or several nucleotides in SEQ ID NO: 25;

[0185] (13-e) a protein comprising an amino acid sequence encoded by a nucleotide sequence having at least 70% identity to the nucleotide sequence of SEQ ID NO: 25; and

[0186] (13-f) a protein comprising an amino acid sequence encoded by a nucleic acid that hybridizes under stringent conditions with a nucleic acid having a nucleotide sequence complementary to the nucleotide sequence of SEQ ID NO: 25.

[0187] (14-a) a protein comprising the amino acid sequence of SEQ ID NO: 28;

[0188] (14-b) a protein comprising an amino acid sequence with deletion, substitution, insertion or addition of one or several amino acids in SEQ ID NO: 28;

[0189] (14-c) a protein comprising an amino acid sequence having at least 70% identity to the amino acid sequence of SEQ ID NO: 28;

[0190] (14-d) a protein comprising an amino acid sequence encoded by a nucleotide sequence with deletion, substitution, insertion or addition of one or several nucleotides in SEQ ID NO: 27;

[0191] (14-e) a protein comprising an amino acid sequence encoded by a nucleotide sequence having at least 70% identity to the nucleotide sequence of SEQ ID NO: 27; and

[0192] (14-f) a protein comprising an amino acid sequence encoded by a nucleic acid that hybridizes under stringent conditions with a nucleic acid having a nucleotide sequence complementary to the nucleotide sequence of SEQ ID NO: 27.

[0193] The proteins that are the aforementioned antigens (1) to (14) and polypeptides (E1) to (E50) mentioned later include those proteins or polypeptides in a form whose amino acid residues are modified by phosphorylation, sugar chain modification, aminoacylation, ring-opening, deamination or the like.

[0194] The proteins that are the aforementioned antigens (1) to (14) and polypeptides (E1) to (E50) mentioned later are preferably antigens of an allergy.

[0195] By stating herein “deletion, substitution, insertion or addition of one or several amino acids” in relation to amino acid sequence, it is meant that in an amino acid sequence of interest, one or several amino acids are deleted, one or several amino acids are substituted by any other amino acids, any other amino acids are inserted, and/or any other amino acids are added. “Several amino acids” are not limited and mean at least 200, at least 100, at least 50, at least 30, at least 20, at least 15, at least 12, at least 10, at least 8, at least 6, at least 4 or at least 3 amino acids. Alternatively, several amino acids mean 30%, preferably 25%, 20%, 15%, 10%, 5%, 3%, 2% or 1%, of amino acids with respect to the total length of the amino acid sequence.

[0196] Among the aforementioned modifications, substitution is preferably conservative substitution. The “conservative substitution” refers to the substitution of a certain amino acid residue by a different amino acid residue having similar physicochemical characteristics, and can be any type of substitution as long as it does not substantially change the characteristics of the structure of the original sequence for example, any type of substitution is acceptable as long as any substituted amino acids do not disrupt the helical structure of the original sequence or other secondary structures that characterize the original sequence. The following gives examples of separate groups of amino acid residues that are conservatively substitutable with each other, but substitutable amino acid residues are not limited to the examples given below.

Group A: leucine, isoleucine, valine, alanine, methionine, glycine, cysteine, proline
Group B: aspartic acid, glutamic acid
Group C: asparagine, glutamine
Group D: lysine, arginine
Group E: serine, threonine
Group F: phenylalanine, tyrosine, tryptophan, histidine

[0197] In the case of non-conservative substitution, one member belonging to one of the aforementioned groups can be replaced with a member belong to any other group. For example, in order to eliminate the possibility of unwanted sugar-chain modification, amino acids of group B, D or E as listed above may be substituted by those of any other group. Also, cysteines may be deleted or substituted by any other amino acids to prevent them from being folded into a protein in its tertiary structure. Also, in order to maintain the balance between hydrophilicity and hydrophobicity or to increase hydrophilicity for the purpose of facilitating synthesis, any amino acids may be substituted in consideration of the hydropathy scales of amino acids, which are a measure of the hydrophilic and hydrophobic properties of amino acids (J. Kyte and R. Doolittle, J. Mol. Biol., Vol. 157, p.105-132, 1982).

[0198] In another embodiment, substitution of the original amino acid by an amino acid with less steric hindrance, for example, substitution of group F by group A, B, C, D or E; or substitution of an amino acid having an electric charge by an amino acid having no electric charge, for example, substitution of group B by group C, may be performed. This may improve binding activity against IgE antibodies.

[0199] As referred to herein, the percent identity between two amino acid sequences can be determined by visual inspection and mathematical calculation. Alternatively, the percent identity can be determined using a computer program. Examples of such computer programs include BLAST and ClustalW. In particular, various conditions (parameters) for identity searches with the BLAST program are described in Altschul, et al. (Nucl. Acids. Res., 25, p.3389-3402, 1997), and are publicly available on the websites of the NCBI and DNA Data Bank of Japan (DDBJ) (Altschul, et al., BLAST Manial, Altschul, et al., NCB/NLM/NIH Bethesda, Md. 20894). Also, the percent identity can be determined using a genetic information processing software program, such as GENETYX Ver.7 (Genetyx Corporation), DINASIS Pro (Hitachi Software Engineering Co., Ltd.), or Vector NTI (Infomax Inc.).

[0200] By stating herein “deletion, substitution, insertion or addition of one or several nucleotides” in relation to nucleotide sequence, it is meant that in a nucleotide sequence of interest, one or several nucleotides are deleted, one or several nucleotides are substituted by any other nucleotides, any other nucleotides are inserted, and/or any other nucleotides are added. “Several nucleotides” are not limited and mean at least 600, at least 300, at least 150, at least 100, at least 50, at least 30, at least 20, at least 15, at least 12, at least 10, at least 8, at least 6, at least 4 or at least 3 nucleotide acids. Alternatively, several nucleotides mean 30%, preferably 25%, 20%, 15%, 10%, 5%, 3%, 2% or 1%, of nucleotides with respect to the total length of the nucleotide sequence. It is preferable that such a nucleotide deletion, substitution, insertion or addition should not give rise to a frame shift in an amino acid coding sequence.

[0201] As referred to herein, the percent identity between two nucleotide sequences can be determined by visual inspection and mathematical calculation. Alternatively, the percent identity can be determined using a computer program. Examples of such sequence comparison computer programs include the BLASTN program, version 2.2.7, available on the website of the National Library of Medicine: https://blast.ncbi.nlm nih.gov/Blast.cgi (Altschul, et al. (1990) J. Mol. Biol., 215: 403-10), or the WU-BLAST 2.0 algorithm. Standard default parameter settings for WU-BLAST 2.0 are found and available on the following website: http://blast.wustl.edu.

[0202] As referred to herein, “under stringent conditions” means that hybridization takes place under moderately or highly stringent conditions. To be specific, the moderately stringent conditions can be easily determined by those having ordinary skill in the art on the basis of, for example, the length of DNA. Basic conditions are described in Sambrook, et al., Molecular Cloning: A Laboratory Manual, 3rd ed., ch.6-7, Cold Spring Harbor Laboratory Press, 2001. The moderately stringent conditions include hybridization under the conditions of preferably 1×SSC to 6×SSC at 42° C. to 55° C., more preferably 1×SSC to 3×SSC at 45° C. to 50° C., most preferably 2×SSC at 50° C. In the case of using a hybridization solution containing, for example, about 50% formamide, a temperature around 5 to 15° C. lower than the foregoing should be adopted. Washing is also carried out under the conditions of 0.5×SSC to 6×SSC at 40° C. to 60° C. In the process of hybridization and washing, generally 0.05% to 0.2% SDS, preferably about 0.1% SDS, may be added. Likewise, the highly stringent conditions can be easily determined by those having ordinary skill in the art on the basis of, for example, the length of DNA. Generally, the highly stringent (high stringent) conditions include hybridization and/or washing at a higher temperature and/or a lower salt concentration than those adopted under the moderately stringent conditions. For example, hybridization is carried out under the conditions of 0.1×SSC to 2×SSC at 55° C. to 65° C., more preferably 0.1×SSC to 1×SSC at 60° C. to 65° C., most preferably 0.2×SSC at 63° C. Washing is carried out under the conditions of 0.2×SSC to 2×SSC at 50° C. to 68° C., more preferably 0.2×SSC at 60 to 65° C.

[0203] Variants corresponding to the proteins as defined above in (b) to (f) of (1) to (14) are not limited and preferably comprise an amino acid sequence of an epitope (variant) mentioned later. The amino acid sequence of the epitope contained is not limited to one sequence and preferably includes all sequences of epitopes derived from each protein. For example, epitopes derived from the protein as defined in (1) are (E9), (E31), (E11), (E36) and (E43). Thus, the variants as defined in (1-b) to (1-f) preferably comprise one or more of the amino acid sequences (including their variants) of the epitopes (E9), (E31), (E11), (E36) and (E43).

[0204] Antigens may be obtained by separating and purifying them from wheat using a combination of protein purification methods well known to those skilled in the art. Also, antigens may be obtained by expressing them as recombinant proteins using a genetic recombination technique well known to those skilled in the art and by separating and purifying them using protein purification methods well known to those skilled in the art.

[0205] Exemplary protein purification methods include: solubility-based purification methods such as salt precipitation and solvent precipitation; purification methods based on molecular weight difference, such as dialysis, ultrafiltration, gel filtration and SDS-PAGE; charge-based purification methods such as ion exchange chromatography and hydroxylapatite chromatography; specific affinity-based purification methods such as affinity chromatography; purification methods based on hydrophobicity difference, such as reverse-phase high-performance liquid chromatography; and purification methods based on isoelectric point difference, such as isoelectric focusing.

[0206] Preparation of a protein by a genetic recombination technique is carried out by preparing an expression vector comprising an antigen-encoding nucleic acid, introducing the expression vector into appropriate host cells by gene transfer or genetic transformation, culturing the host cells under suitable conditions for expression of a recombinant protein, and recovering the recombinant protein expressed in the host cells.

[0207] The “vector” refers to a nucleic acid that can be used to introduce a nucleic acid attached thereto into host cells. The “expression vector” is a vector that can induce the expression of a protein encoded by a nucleic acid introduced therethrough. Exemplary vectors include plasmid vectors and viral vectors. Those skilled in the art can select an appropriate expression vector for the expression of a recombinant protein depending on the type of host cells to be used.

[0208] The “host cells” refers to cells that undergo gene transfer or genetic transformation by a vector. The host cells can be appropriately selected by those skilled in the art depending on the type of the vector to be used. The host cells can be derived from prokaryotes such as E. coli. When prokaryotic cells like E coli. are used as host cells, the antigen of the present invention may be designed to contain an N-terminal methionine residue in order to facilitate the expression of a recombinant protein in the prokaryotic cells. The N-terminal methionine can be cleaved from the recombinant protein after expression. Also, the host cells may be cells derived from eukaryotes, such as single-cell eukaryotes like yeast, plant cells and animal cells (e.g., human cells, monkey cells, hamster cells, rat cells, murine cells or insect cells) or silkworm.

[0209] Gene transfer or genetic transformation of an expression vector into host cells can be carried out as appropriate by following a technique known to those skilled in the art. Those skilled in the art can make possible the expression of a recombinant protein by selecting suitable conditions for the expression of the recombinant protein as appropriate depending on the type of host cells and culturing the host cells under the selected conditions. Then, those skilled in the art can homogenize the host cells having the expressed recombinant protein, and separate and purify an antigen expressed as the recombinant protein from the resulting homogenate by using an appropriate combination of such protein purification methods as mentioned above. The aforementioned expression vector or synthesized double-stranded DNA, or mRNA transcribed therefrom is introduced into a cell-free protein synthesis system for expression, and the expressed protein can be separated and purified to prepare an antigen.

[0210] Preferably, the antigen of the present invention specifically binds to an IgE antibody from an allergic patient.

[0211] Diagnosis Kit and Method (1)

[0212] The present invention provides a method for providing an indicator for diagnosing an allergy in a subject, the method comprising the steps of:

(i) contacting a sample obtained from the subject with an antigen, wherein the sample is a solution comprising an IgE antibody;
(ii) detecting binding between an IgE antibody present in the sample from the subject and the antigen; and
(iii) when the binding between the IgE antibody in the subject and the antigen is detected, an indicator of the fact that the subject is allergic is provided;
wherein the antigen is at least one of proteins as defined above in any of (1) to (14).

[0213] In one embedment, the “allergy” is not limited and is an allergy to grain, preferably an allergy to grain of the family Poaceae or an allergy to wheat.

[0214] As referred to herein, the “diagnosis” includes mere “detection” having a potential, in addition to (definitive) diagnosis that is generally made by a physician. As referred to herein, in one embodiment, the “diagnosis” and the “detection” are in vivo, in vitro or ex vivo “diagnosis” and “detection”. In vitro “diagnosis” and “detection” are preferred.

[0215] The sample obtained from a subject is a solution containing an IgE antibody, as collected from the subject. Examples of such solutions include blood, saliva, sputum, snivel, urine, sweat, and tear. The sample obtained from the subject may be subjected to pretreatment for increasing the concentration of an IgE antibody in the sample before being contacted with an antigen. The pretreatment of a sample may involve, for example, collection of the serum or the plasma from the blood. Furthermore, a Fab moiety that is an antigen-binding moiety may be purified. In a particularly preferred embodiment, the step (i) mentioned above is carried out by contacting an IgE antibody present in the serum obtained from a subject with an antigen.

[0216] The IgE antibody may be the IgE antibody itself or may be mast cells or the like bound to IgE antibodies.

[0217] Detection of contact and binding between the sample obtained from a subject and an antigen can be carried out by using a known method. Examples of such methods that can be used include detection by ELISA (Enzyme-Linked Immunosorbent Assay), sandwich immunoassay, immunoblotting technique, immunoprecipitation, or immunochromatography. These are all techniques for detecting binding between an antigen and an IgE antibody from a subject by contacting and binding the IgE antibody from a subject with the antigen, allowing an enzymatically labelled secondary antibody to act on the IgE antibody specifically bound to the antigen, and adding an enzyme substrate (generally, chromogenic or luminescent reagent) to detect an enzymatic reaction product. Also, a method for detecting a fluorescently labeled secondary antibody can be used. Alternatively, detection by a measurement method capable of evaluating binding between an antigen and an IgE antibody, such as surface plasmon resonance (SPR), can also be used. A plurality of antigen-specific IgE antibodies may be mixed.

[0218] The antigen may be provided as an isolated antigen in a state immobilized on a carrier. In this case, the steps (i) and (ii) mentioned above can be carried out using ELISA, sandwich immunoassay, immunochromatography, surface plasmon resonance, or the like. Also, the step (i) mentioned above can be carried out by contacting the sample obtained from a subject with an antigen-immobilized surface. The isolated antigen may be obtained by separating and purifying it from a subject (raw materials, processed products, etc.) using a combination of protein purification methods well known to those skilled in the art, or by preparing it using a genetic recombination technique. Alternatively, an antibody may be attached to a carrier.

[0219] The antigen may be in a state unimmobilized on a carrier. In this case, flow cytometry or the like can be used in the aforementioned steps (i) and (ii), and the presence of the antigen bound to the antibody can be confirmed with laser beam. Examples include a basophil activation test (BAT). Another example includes a histamine release test (HRT) which examines whether histamine is released by further contacting an antigen with blood cells in a sample.

[0220] The antigen may be detected by an immunoblotting technique after transfer from a state separated by two-dimensional electrophoresis. The two-dimensional electrophoresis is a technique for separating a protein sample by performing isoelectric focusing in the first dimension and performing SDS-PAGE in the second dimension. The conditions for two-dimensional electrophoresis are not particularly limited as long as the conditions permit the separation of the antigen of the present invention. For example, the conditions for two-dimensional electrophoresis as described above in the subsection titled “Identification of antigens” can be adopted. Also, the electrophoresis conditions may be defined by reference to the descriptions in Patent Literatures 1 to 4 mentioned above. For example, two-dimensional electrophoresis can be carried out under the conditions that satisfy at least one selected from the group consisting of the following requirements:

(A) the isoelectric focusing gels used in the first dimension should have a gel-strip length of 5 to 10 cm and a gel pH range of 3 to 10, and the pH gradient of the gels in the direction of electrophoresis should be as follows: where the gel-strip length up to pH 5 is taken as “a”, that length from pH 5 to 7 as “b”, and that length above pH 7 as “c”, the relations “a<b” and “b>c” are satisfied;
(B) in the case of (A), when the total gel-strip length is taken as 1, “a” should be in the range of 0.15 to 0.3, “b” should be in the range of 0.4 to 0.7, and “c” should be in the range of 0.15 to 0.3;
(C) in the first dimensional isoelectric focusing, a constant voltage step should be performed by applying a constant voltage ranging from 100 V to 600 V per gel strip containing a sample, and after the electrophoresis variation width during electrophoresis for 30 minutes falls within the range of 5 μA, a voltage-increasing step should be started at which the voltage is increased from the aforementioned constant voltage;
(D) in the case of (C), the final voltage at the voltage-increasing step should be in the range of 3000 V to 6000 V;
(E) the isoelectric focusing gels used in the first dimension should have a longitudinal gel-strip length of 5 to 10 cm, and the electrophoresis gels used in the second dimension should have a gel concentration at the distal end in the direction of electrophoresis, which is in the range of 3 to 6%; and
(F) in the case of (E), the electrophoresis gels used in the second dimension should have a gel concentration at the proximal end in the direction of electrophoresis, which is set to a higher value than that at the distal end in the direction of electrophoresis.

[0221] The aforementioned antigens (1) to (14) are antigens that specifically bind to IgE antibodies from allergic patients (e.g., patients with allergy to wheat). Therefore, when binding between an IgE antibody from a subject and the antigen is detected, an indicator of the fact that the subject is allergic is provided.

[0222] The present invention further provides a kit for diagnosing an allergy, comprising at least one of the aforementioned antigens (1) to (14). The diagnosis kit of this invention may be used in the aforementioned method for providing an indicator for diagnosing an allergy or in a diagnosis method as described later. The diagnosis kit of this invention may comprise not only the at least one of the aforementioned antigens (1) to (14), but also an anti-IgE antibody labeled with an enzyme and a chromogenic or luminescent substrate serving as a substrate for the enzyme. Also, a fluorescent-labeled anti-IgE antibody may be used. In the diagnosis kit of this invention, the antigen may be provided in a state immobilized on a carrier. The diagnosis kit of this invention may also be provided together with instructions on the procedure for diagnosis or a package containing said instructions.

[0223] In another embodiment, the aforementioned diagnosis kit comprises a companion diagnostic agent for an allergy. The companion diagnostic agent is used for identifying patients expected to respond to pharmaceutical products or identifying patients having the risk of severe adverse reactions to pharmaceutical products, or for studying the reactivity of pharmaceutical products in order to optimize treatment using the pharmaceutical products. Here, the optimization of treatment includes, for example, determination of dosage and administration, judgment regarding discontinuation of administration, and confirmation of an allergen component that is used to cause immunological tolerance.

[0224] The present invention further provides a composition for diagnosing an allergy, comprising at least one of the aforementioned antigens (1) to (14). The diagnosis composition of this invention can be used in a diagnosis method as described below. The diagnosis composition of this invention may further comprise a pharmaceutically acceptable carrier and/or additives commonly used with the antigen of this invention depending on the need.

[0225] In one embodiment, the present invention provides a method for diagnosing an allergy in a subject, the method comprising:

(i) contacting a sample obtained from the subject with an antigen;
(ii) detecting binding between an IgE antibody present in the sample from the subject and the antigen; and
(iii) when the binding between the IgE antibody in the subject and the antigen is detected, diagnosing the subject as being allergic;
wherein the antigen is at least one of proteins as defined above in any of (1) to (14). In this method, the steps (i) and (ii) are performed as described above regarding the corresponding steps of the method for providing an indicator for diagnosing an allergy.

[0226] In another embodiment, the present invention provides a method for diagnosing an allergy in a subject, the method comprising administering to the subject at least one of the aforementioned antigens (1) to (14). This method may be performed in the form of a skin test characterized by applying the antigen onto the skin. Examples of the skin test include various forms of tests, such as: a prick test in which a diagnosis composition is applied onto the skin and then a tiny prick to such an extent as not to provoke bleeding is made in the skin to allow an antigen to penetrate the skin, thereby observing a skin reaction; a scratch test in which a diagnosis composition is applied onto the skin and then the skin is lightly scratched to observe a reaction; a patch test in which a diagnosis composition in the form of cream, ointment, etc. is applied onto the skin to observe a reaction; and an intracutaneous test in which an antigen is administered intracutaneously to observe a reaction. If a skin reaction such as swelling occurs in a skin portion to which the antigen has been applied, the subject of interest is diagnosed as having an allergy. The amount of the antigen to be applied to the skin in such tests can be, for example, not more than 100 μg per dose.

[0227] In the process of allergy diagnosis, a load test aiming to identify an antigen is often adopted. At least one of the aforementioned antigens (1) to (14) can be used as an active ingredient for a load test to diagnose an allergy. Here, the antigen protein to be used in the load test may be a protein that has been expressed and purified and may be a protein that has been expressed in raw materials or processed products, such as rice-based vaccine expressing pollen allergens which are obtained by transforming rice with a gene of a cedar pollen antigen and expressing the antigen protein in the rice.

[0228] In one embodiment, the diagnosis composition or the diagnosis kit described above may be used for a prick test, a scratch test, a patch test, an intracutaneous test or the like.

[0229] In yet another embodiment, the present invention provides at least one of the aforementioned antigens (1) to (14), intended for use in the diagnosis of an allergy. This also includes the provision of at least one of the aforementioned antigens (1) to (14) mixed with a known antigen.

[0230] In still another embodiment, the present invention provides use of at least one of the aforementioned antigens (1) to (14) for the production of a composition for diagnosing an allergy.

[0231] Composition and Treatment Method (1)

[0232] The present invention provides a composition comprising at least one of the aforementioned antigens (1) to (14).

[0233] In one embodiment, the composition of the present invention is a pharmaceutical composition. In one embodiment, the composition of the present invention is a quasi-pharmaceutical composition or a non-pharmaceutical composition (e.g., a cosmetic composition and a food composition).

[0234] In one embodiment, the aforementioned composition is used for the treatment of an allergy (e.g., an allergy to wheat). As referred to herein, the “treatment of an allergy” increases the limit amount of an antigen in which the allergy does not develop even if the antigen is incorporated into the body, and finally aims for the state where the allergy does not develop by the common amount of the antigen to be consumed (remission).

[0235] The present invention also provides a method for treating an allergy, the method comprising administering at least one of the aforementioned antigens (1) to (14) to a patient in need of a treatment for an allergy.

[0236] In another embodiment, the present invention provides at least one of the aforementioned antigens (1) to (14), intended for use in the treatment for an allergy. In yet another embodiment, the present invention provides use of at least one of the aforementioned antigens (1) to (14) for the production of a therapeutic agent for an allergy.

[0237] In the process of allergy treatment, a hyposensitization therapy aiming to induce immunological tolerance by administering an antigen to a patient is often adopted. The at least one of the aforementioned antigens (1) to (14) can be used as an active ingredient for a hyposensitization therapy for an allergy. Here, the antigen protein to be used in the hyposensitization therapy may be a protein that has been expressed and purified and may be a protein that has been expressed in raw materials or processed products, such as rice-based vaccine expressing pollen allergens which are obtained by transforming rice with a gene of a cedar pollen antigen and expressing the antigen protein in the rice.

[0238] The composition of the present invention can be administered by common administration routes. Examples of common administration routes include oral, sublingual, percutaneous, intracutaneous, subcutaneous, intravascular, intranasal, intramuscular, intraperitoneal, and intrarectal administrations.

[0239] The composition of the present invention can be used as a composition to which a commonly used pharmaceutically acceptable adjuvant or excipient or any other additives (e.g., stabilizer, solubilizer, emulsifier, buffer, preservative, colorant) are added by a conventional method together with the antigen of this invention depending on the need. The dosage form of the composition can be selected by those skilled in the art as appropriate depending on the administration route. The composition can be in the form of, for example, tablet, capsule, troche, sublingual tablet, parenteral injection, intranasal spray, poultice, solution, cream, lotion, or suppository. The administration dose, frequency and/or period of the composition of this invention can be selected by a physician as appropriate depending on the administration route and the patient's condition and characteristics such as age and body weight. For example, the composition may be administered to an adult patient at a dose of not more than 100 μg per dose. The administration interval can be, for example, once daily, once weekly, twice weekly, once per three months or so. The administration period can be, for example, several weeks to several years. The composition may be administered in such a manner that the dose is increased in incremental steps over the administration period.

[0240] Tester Composition (1)

[0241] The present invention provides a tester composition comprising an antibody for at least one of the aforementioned antigens (1) to (14).

[0242] The antibody can be prepared by a conventional method. For example, the antibody may be prepared by immunizing a mammal such as rabbit with one of the aforementioned antigens (1) to (14). The antibody may be an Ig antibody, a polyclonal antibody, a monoclonal antibody, or an antigen-binding fragment thereof (e.g., Fab, F(ab′)2, Fab′).

[0243] Further, in the aforementioned tester composition, the antibody may be provided in a form bound to a carrier. The type of the carrier is not particularly limited as long as it is usable for detection of binding between an antibody and an antigen. Any given carrier known to those skilled in the art can be used.

[0244] Examples of a method for determining the presence or absence of an antigen include the following methods:

a method in which a prepared tester composition comprising an Ig antibody is contacted with a sample obtained from raw materials or processed products, etc., ELISA or the like method is used to detect whether there is a binding between the Ig antibody and an antigen in the sample, and if the binding between the Ig antibody and the antigen is detected, it is determined that the antigen is contained in the raw materials or processed products, etc. of interest; and
a method in which filter paper is impregnated with raw materials or processed products and reacted with an antibody solution so as to detect an antigen contained therein.

[0245] Another embodiment of the present invention includes a tester composition for determining the presence or absence of an antigen of an allergy in an object of interest, the tester composition comprising a primer having a nucleotide sequence complementary to a portion of at least one of the nucleotide sequences of SEQ ID NOs: 1, 3, 5, 7, 9, 11, 13, 15, 17, 19, 21, 23, 25 or 27. The primer has, for example, but not limited to, a nucleotide sequence complementary to, preferably, 12 bases, 15 bases, 20 bases, or 25 bases, in a 3′-terminal or central sequence in a partial sequence of at least one of the nucleotide sequences of SEQ ID NOs: 1, 3, 5, 7, 9, 11, 13, 15, 17, 19, 21, 23, 25 or 27. Particularly, when mRNA is of interest, the tester has a complementary primer of a poly-A tail. In a preferred embodiment, the tester composition comprising the primer mentioned above may further comprise a primer comprising a 5′-terminal nucleotide sequence, preferably a nucleotide sequence of 12 bases, 15 bases, 20 bases, or 25 bases, of at least one of the nucleotide sequences of SEQ ID NOs: 1, 3, 5, 7, 9, 11, 13, 15, 17, 19, 21, 23, 25 or 27.

[0246] For example, cDNA is amplified by PCR (Polymerase Chain Reaction) including RT-PCR (Reverse Transcription-Polymerase Chain Reaction) using templated DNA or mRNA obtained from wheat and the aforementioned complementary primer, and the sequence of the amplified cDNA is compared with SEQ ID NOs: 1, 3, 5, 7, 9, 11, 13, 15, 17, 19, 21, 23, 25 or 27 to determine the presence or absence of the antigen. Amplification methods by PCR can be exemplified by RACE (Rapid Amplification of cDNA End). In this respect, even if there exists a point mutation encoding the same amino acid in the comparison of the amplified cDNA with SEQ ID NOs: 1, 3, 5, 7, 9, 11, 13, 15, 17, 19, 21, 23, 25 or 27, or even if the nucleotide sequence of the amplified cDNA has insertion, deletion, substitution or addition of bases in the nucleotide sequences of SEQ ID NOs: 1, 3, 5, 7, 9, 11, 13, 15, 17, 19, 21, 23, 25 or 27, it is determined that the antigen is present when the amino acid sequence encoded by the cDNA has at least 70%, preferably at least 80, 90, 95, 98, or 99% identity to the amino acid sequence of SEQ ID NOs: 2, 4, 6, 8, 10, 12, 14, 16, 18, 20, 22, 24 or 28.

[0247] In one embodiment, the aforementioned tester composition, for example, is used to determine the presence or absence of an antigen in cooking ingredients (wheat) or in products of interest in a food production line. The tester composition may also be used for quality inspection of production lines and pre-shipment products by manufacturers, or may be used for self-checking of the presence or absence of an antigen in raw materials or processed products of interest by consumers. Also, it may be used for checking of the presence or absence of an antigen based on increase or decrease in the peak of the protein using a mass spectrometer.

[0248] Method for Determining Presence or Absence of Antigen (1)

[0249] The present invention includes a method for determining the presence or absence of at least one of the aforementioned antigens (1) to (14) in a substance of interest, comprising contacting an antibody for the at least one of the aforementioned antigens (1) to (14) with a raw material or a processed product (including a liquid).

[0250] The raw material may be a cooking ingredient or may be a cosmetic raw material, a pharmaceutical raw material or the like. The processed product may be an edible processed product or may be a cosmetic, a pharmaceutical product or the like.

[0251] Such an antibody, a method for preparing the antibody, a method for contacting the antibody with a raw material or a processed product, the binding between the antibody and the antigen, etc. are as described above in the subsection titled “Tester composition (1)”.

[0252] Antigen-Free Food and the Like (1)

[0253] The present invention provides a raw material or processed product in which at least one of the aforementioned antigens (1) to (14) is eliminated or reduced. In one embodiment, the “raw material or processed product” is “wheat or a processed product of wheat”.

[0254] The method for eliminating or reducing the antigen of the present invention in a raw material or processed products is not limited. The elimination or reduction of the antigen may be conducted by any method, as long as the method permits the elimination or reduction of the antigen.

[0255] For example, the raw material (e.g., wheat) of the present invention whose antigen is eliminated or reduced may be obtained by preparing a raw material in which the expression of the antigen of the present invention is modified, using a gene modification technique.

[0256] Any technique known to those skilled in the art can be used as the genetic modification technique. For example, Oishi, et al. (Scientific Reports, Vol. 6, Article number: 23980, 2016, doi:10.1038/srep23980) states that individuals with ovomucoid gene deletion are obtained by applying a genome editing technique CRISPER/Cas9 to chicken primordial germ cells. The raw material of the present invention whose antigen is eliminated may be obtained through the use of a similar technique.

[0257] The wheat of the present invention whose antigen is reduced may be obtained by mating through artificial insemination with raw materials (e.g., wheat) containing no antigen or containing the antigen in a small amount. The artificial crossing of raw materials can be performed by a conventional method, for example, a method for pollinating selected breeds for the purpose of breed improvement of foods. For example, hypoallergenic wheat 1BS-18 Hokushin can be selected as antigen-deficient wheat for the selected breeds.

[0258] An antigen of the present invention may be the artefact that an antigen of the present invention assumed the removal or a reduced raw material as for the removal or the reduced processed products. In the case of using an ordinary raw material as a material, a treatment for removing or reducing the antigen of this invention is performed before or after preparation of a processed product. The methods for removing or reducing the antigen of the present invention in the processed products which assumed an ordinary raw material as a material include a method to remove protein component in raw materials or processed products such as a high pressure treatment and elution with the neutral salt solution or the high temperature steam, and a method to perform hydrolysis, denaturation, or amino acid alteration (chemical modification, elimination, or the like of a side chain) by heat treatment and acid treatment.

[0259] Method for Producing Raw Material or Processed Product in which Antigen is Eliminated or Reduced (1)

[0260] The present invention provides a method for producing a raw material or processed products in which an antigen is eliminated or reduced, the method comprising the step of confirming that the antigen is eliminated or reduced, in a production process of the processed product, wherein the antigen is at least one of the aforementioned antigens (1) to (14).

[0261] The step of confirming that the antigen is eliminated or reduced, in a production process of the raw materials or processed products in which an antigen is eliminated or reduced may be performed by confirming the presence or absence of an antigen by the method described above in the subsection titled “Tester Composition (1)”.

[0262] The production of the wheat or processed products of wheat in which an antigen is eliminated or reduced may be performed by the method described above in the subsection titled “Antigen-free food and the like”.

[0263] Epitope

[0264] Epitopes and amino acids important for binding activity against IgE antibodies from allergic patients within the epitopes were identified as shown in Example 4 as to antigens identified as shown in Examples 1-3.

[0265] The results are summarized in Table 2.

TABLE 2
E1
Spot No. 9

| | | | | Food in which | | | |
|---|---|---|---|---|---|---|---|
| | | | SEQ ID | cross-reactivity | Graph | | SEQ ID |
| Protein name | LMW-D8(LMW-GS) B2BZD1 | | NO | was confirmed | No. | Synthetic sequence | NO |
| 15-residue | QQLLWYHQQQPIQQQ (positions 41-55 of | | 29 | | | | |
| sequence | SEQ ID NO: 18) | | | | | | |
| P2 | Key | QPIQ | 30 | | | | |
| P3 | More preferably | XXXXXXXQQXPIQQQ | 31 | | | | |
| | Preferably | XXXXXXXXQXXIQQQ | 32 | | | | |
| | Key | XXXXXXXXXXXIQQQ | 33 | | | | |
| | Preferably | QQPIQQ | 34 | | | | |
| | Key | XQXIQQ | 35 | | | | |
| P4 | More preferably | XXXXXYXQQXPIQQQ | 36 | | | | |
| | Preferably | XXXXXYXQQXXIQQQ | 37 | | | | |
| | Key | XXXXXXXQXXXIQQX | 38 | | | | |
| | Most preferably | HQQQPIQQ | 39 | | | | |
| | Further preferably | QQQPIQQ | 40 | | | | |
| | More preferably | QQQPIQ | 41 | | | | |
| | Preferably | QQXPIQ | 42 | | | | |
| | Key | QQXXIQ | 43 | | | | |
| P7 | Preferably | XXXXXYXQXXXIQQX | 44 | | | | |
| | Key | XXXXXXXQXXXIQQX | 45 | Wheat | 1 | QQLLWYHQQQPIQQQ | 29 |
| | | | | Barley | | NSQLIQMQQLQIQQQ | 2880 |
| | Preferably | QQQPIQQ | 46 | | | | |
| | Key | QXXXIQQ | 47 | | | | |
| | Preferably | QQPIQQ | 48 | | | | |
| | Key | QQPIQ | 49 | | | | |
| P8 | More preferably | QXXXWYHQQXPIQQQ | 50 | | | | |
| | Preferably | XXXXXYHQQXPIQQQ | 51 | | | | |
| | Key | XXXXXYXXXXXIQQQ | 52 | | | | |
| | More preferably | YHQQQPIQQ | 53 | | | | |
| | Preferably | HQQQPIQQ | 54 | | | | |
| | Key | HQQXPIQQ | 55 | | | | |
| | Key | QQQPIQQ | 56 | | | | |
| P9 | Preferably | QPIQQ | 57 | | | | |
| | Key | PIQQ | 58 | | | | |
| P10 | Key | QPIQQ | 59 | | | | |
| P12 | Preferably | QQPIQQ | 60 | | | | |
| | Key | QPIQ | 61 | | | | |
| P13 | Key | XXXXXYXQXXXIQQX | 62 | Wheat | 1 | QQLLWYHQQQPIQQQ | 29 |
| | | | | Barley | | NSQLIQMQQLQIQQQ | 2880 |
| | Preferably | QQQPIQQ | 63 | | | | |
| | Key | QXXXIQQ | 64 | | | | |
| | Key | QQQPIQ | 65 | | | | |
| P14 | Preferably | QQQPIQQ | 66 | | | | |
| | Key | QXXPIQQ | 67 | | | | |
| P15 | Preferably | QQQPIQQ | 68 | | | | |
| | Key | QXXXIQQ | 69 | | | | |
| | Key | QQQPIQ | 70 | | | | |
| P17 | Preferably | XXXLXYXQXXPIQQX | 71 | | | | |
| | Key | XXXXXXXQXXPIQQX | 72 | | | | |
| | Further preferably | HQQQPIQQ | 73 | | | | |
| | More preferably | QQQPIQQ | 74 | | | | |
| | Preferably | QQQPIQ | 75 | | | | |
| | Key | QXXPIQ | 76 | | | | |
| P19 | Preferably | QQQPIQQ | 77 | | | | |
| | Key | QXXPIQQ | 78 | | | | |
| P21 | Key | QQILWY | 79 | | | | |
| | Preferably | QQQPIQQ | 80 | | | | |
| | Key | QQPIQ | 81 | | | | |
| P22 | More preferably | QQQPIQQ | 82 | | | | |
| | Preferably | QXXPIQQ | 83 | | | | |
| | Key | QXXXIQQ | 84 | | | | |
| P24 | Key | QQILWYHQQQ | 85 | | | | |
| | Preferably | QQQPIQQ | 86 | | | | |
| | Key | QQQPIQ | 87 | | | | |
| P25 | Key | QQILWYH | 88 | | | | |
| | Key | QQPIQ | 89 | | | | |
| P26 | Key | XXXXXXXQXXPIQQX | 90 | | | | |
| | Preferably | QPIQQ | 91 | | | | |
| | Key | XPIQQ | 92 | | | | |
| P27 | Preferably | QQILXYHQQQPIQQQ | 93 | | | | |
| | Key | QQIXXYHQQXPIQQQ | 94 | | | | |
| | Preferably | YHQQQPIQQ | 95 | | | | |
| | Key | YHQQXPIQQ | 96 | | | | |
| P28 | Preferably | XXXXXYXQQXXIQQQ | 97 | | | | |
| | Key | XXXXXYXXQXXIQQX | 98 | | | | |
| | Further preferably | YHQQQPIQQ | 99 | | | | |
| | More preferably | QQQPIQQ | 100 | | | | |
| | Preferably | QQXXIQQ | 101 | | | | |
| | Key | XQXXIQQ | 102 | | | | |
| P31 | Key | QQILWYH | 103 | | | | |
| | Preferably | QQQPIQ | 104 | | | | |
| | Key | QQQPI | 105 | | | | |
| P32 | Key | XXXXXXXQQXPIQQX | 106 | | | | |
| | Key | QILWY | 107 | | | | |
| | Further preferably | HQQQPIQQ | 108 | | | | |
| | More preferably | QQQPIQ | 109 | | | | |
| | Preferably | QQXPIQ | 110 | | | | |
| | Key | QXXPXQ | 111 | | | | |
| P33 | Key | XXXXXXXQXXPIQQX | 112 | | | | |
| | More preferably | QQQPIQQ | 113 | | | | |
| | Preferably | QQQPIQ | 114 | | | | |
| | Key | QXXPIQ | 115 | | | | |
| P34 | Key | XXXXXXHXXXPIQQX | 116 | | | | |
| | Key | QQILWYHQQQ | 117 | | | | |
| | Preferably | QQQPIQQ | 118 | | | | |
| | Key | XXXPIQQ | 119 | | | | |
| | Key | QQPIQ | 120 | | | | |
| P35 | Key | YHQQQPIQQQ | 121 | | | | |
| P36 | Key | XXXXXXXQXXXIQQX | 122 | Wheat | 1 | QQLLWYHQQQPIQQQ | 29 |
| | | | | Barley | | NSQLIQMQQLQIQQQ | 2880 |
| | Preferably | QPIQQ | 123 | | | | |
| | Key | QPIQ | 124 | | | | |
| G6 | More preferably | XXILWYXQQQPIQQQ | 125 | | | | |
| | Preferably | XXILXYXQQQPIQQQ | 126 | | | | |
| | Key | XXXXXYXQQQPIQQQ | 127 | | | | |
| | More preferably | YHQQQPI | 128 | | | | |
| | Preferably | YHQQQP | 129 | | | | |
| | Key | YXQQQP | 130 | | | | |

E2
Spot No. 2

| | | | | Food in which | | | |
|---|---|---|---|---|---|---|---|
| | | | SEQ ID | cross-reactivity | Graph | | SEQ ID |
| Protein name | LMW-m glutenin subunit8 V9P767 | | NO | was confirmed | No. | Synthetic sequence | NO |
| 15-residue | PPFPQQHQQFPQQQI (positions 151-165 of | | 131 | | | | |
| sequence | SEQ ID NO: 4) | | | | | | |
| P2 | Key | XXXXXXXQQXPQQQI | 132 | | | | |
| | Key | QQFPQQQI | 133 | | | | |
| P3 | Preferably | XXXXXXXXXXPQQQI | 134 | | | | |
| | Key | XXXXXXXXXXXQQQI | 135 | | | | |
| P4 | Key | XXXXXXXQXXPQQQX | 136 | | | | |
| P7 | Key | FPQQHQQ | 137 | | | | |
| P8 | | | 138 | | | | |
| P9 | Key | XXXXXQXQQFPQQQI | 139 | | | | |
| P10 | Preferably | XXXXXXXQXXXQQQI | 140 | | | | |
| | Key | XXXXXXXXXXXQQQI | 141 | | | | |
| | Key | FPQQHQ | 142 | | | | |
| | More preferably | QQFPQQQI | 143 | | | | |
| | Preferably | QXXXQQQI | 144 | | | | |
| | Key | XXXXQQQI | 145 | | | | |
| P12 | Key | XXXXXXXQXXXQQQI | 146 | | | | |
| | Key | PFPQQHQQFP | 147 | | | | |
| P13 | Key | XXXXXXXQXXXQQQI | 148 | | | | |
| | Key | FPQQHQQ | 149 | | | | |
| P14 | Key | XXXXXXHQXXPQQQX | 150 | | | | |
| P15 | Preferably | FPQQHQQF | 151 | | | | |
| | Key | FPQQHQQ | 152 | | | | |
| P17 | More preferably | XXXXXXXQXXPQQQI | 153 | | | | |
| | Preferably | XXXXXXXQXXXQQQI | 154 | | | | |
| | Key | XXXXXXXXXXXQQQI | 155 | | | | |
| | Preferably | PPFPQQHQQF | 156 | | | | |
| | Key | FPQQHQQF | 157 | | | | |
| | Preferably | QQFPQQQI | 158 | | | | |
| | Key | FPQQQ | 159 | | | | |
| | Key | XXQQQI | 160 | | | | |
| P19 | Key | XXXXXXXQXXPQQQI | 161 | | | | |
| P21 | Key | XXXXXXXQXXXQQQI | 162 | | | | |
| P24 | Key | XXXXXXXQXXPQQQI | 163 | | | | |
| | Key | FPQQHQQ | 164 | | | | |
| P25 | Key | XXXXXXXXXXPQQQI | 165 | | | | |
| | Key | FPQQHQQ | 166 | | | | |
| P26 | Preferably | XXXXXXHQXXPQQQI | 167 | | | | |
| | Key | XXXXXXXQXXPQQQI | 168 | | | | |
| | Key | FPQQHQQF | 169 | | | | |
| P28 | Key | XXXXXXXQXXXQQQI | 170 | | | | |
| | Key | PPFPQQHQ | 171 | | | | |
| | Preferably | QQFPQQQI | 172 | | | | |
| | Key | QXXXQQQI | 173 | | | | |
| P31 | Key | XXXXXXXQXXXQQQI | 174 | | | | |
| P32 | Preferably | XXXXQQHQQXPQQQX | 175 | | | | |
| | Key | XXXXXXXQXXPQQQX | 176 | | | | |
| | Preferably | PPFPQQHQQ | 177 | | | | |
| | Key | XXXXQQHQQ | 178 | | | | |
| P33 | Key | XXXXXXXQXXPQQQX | 179 | | | | |
| P35 | Preferably | FPQQHQQFP | 180 | | | | |
| | Key | FPQQHQQF | 181 | | | | |
| | Key | QQFPQQQI | 182 | | | | |
| P36 | Preferably | XPXXQQHQQXPQQQI | 183 | | | | |
| | Key | XXXXQQHQXXPQQQI | 184 | | | | |
| | More preferably | PPFPQQHQQ | 185 | | | | |
| | Preferably | XPXXQQHQQ | 186 | | | | |
| | Key | XXXXQQHQX | 187 | | | | |
| | More preferably | QHQQFPQQQI | 188 | | | | |
| | Preferably | QHQQXPQQQI | 189 | | | | |
| | Key | XXQXXXQQQI | 190 | | | | |

E3
Spot No. 9

| | | | | Food in which | | | |
|---|---|---|---|---|---|---|---|
| | | | SEQ ID | cross-reactivity | Graph | | SEQ ID |
| Protein name | LMW-D8(LMW-GS) B2BZD1 | | NO | was confirmed | No. | Synthetic sequence | NO |
| 15-residue | SQQQQPFPQQQQPLL (positions 111-125 of | | 191 | | | | |
| sequence | SEQ ID NO: 18) | | | | | | |
| P2 | Preferably | XXQQQXFPQQQXPXX | 192 | | | | |
| | Key | XXXQQXFPQQQXXXX | 193 | | | | |
| | Most preferably | QQQQPFPQQQ | 194 | | | | |
| | Further preferably | QQPFPQQQ | 195 | | | | |
| | More preferably | QPFPQQ | 196 | | | | |
| | Preferably | QXFPQQ | 197 | | | | |
| | Key | QXXPQQ | 198 | | | | |
| P3 | Key | XQQQQPFPQQQQPXX | 199 | | | | |
| | Preferably | QQQQPFPQQQ | 200 | | | | |
| | Key | XXQQXFXQQQ | 201 | | | | |
| P4 | Preferably | XXXQQXFPQQQXXXX | 202 | | | | |
| | Key | XXXQQXXPQQXXXXX | 203 | Wheat | 1 | SQQQQPFPQQQQPLL | 191 |
| | | | | Orchard grass | | QEQQQYYPQQQAFFL | 2881 |
| | Further preferably | QQPFPQQ | 204 | | | | |
| | More preferably | QPFPQQ | 205 | | | | |
| | Preferably | QXFPQQ | 206 | | | | |
| | Key | QXXPQQ | 207 | | | | |
| P7 | Key | XQQQQXXPQQQXXXL | 208 | | | | |
| | Preferably | QQQQPFPQQQ | 209 | | | | |
| | Key | QQQQXXPQQQ | 210 | | | | |
| | More preferably | QPFPQQQQPL | 211 | | | | |
| | Preferably | QPFPQQQQP | 212 | | | | |
| | Key | QXXPQQQXX | 213 | | | | |
| P8 | More preferably | XQQQQXFPQQQXXXX | 214 | | | | |
| | Preferably | XXQQQXFPQQXXXXX | 215 | | | | |
| | Key | XXXQQXFXQQXXXXX | 216 | | | | |
| | More preferably | QQPFPQQQ | 217 | | | | |
| | Preferably | QQPFPQQ | 218 | | | | |
| | Key | QPFPQQ | 219 | | | | |
| P10 | Key | XXXQQXXPQQQXXXX | 220 | Wheat | 1 | SQQQQPFPQQQQPLL | 191 |
| | | | | Orchard grass | | QEQQQYYPQQQAFFL | 2881 |
| | Preferably | QQPFPQQQ | 221 | | | | |
| | Key | QQPF | 222 | | | | |
| P12 | Preferably | QQQQPFPQQQ | 223 | | | | |
| | Key | QPFPQQQ | 224 | | | | |
| | Preferably | QQPFPQQQQP | 225 | | | | |
| | Key | XQXXPQQQXP | 226 | | | | |
| P14 | | | 227 | | | | |
| | Preferably | QPFPQQQ | 228 | | | | |
| | Key | QPFP | 229 | | | | |
| P15 | Key | XXXQQPXPQQQQPLL | 230 | | | | |
| | More preferably | QQPFPQQQQP | 231 | | | | |
| | Preferably | QPFPQQQ | 232 | | | | |
| | Key | QPXPQQQ | 233 | | | | |
| P17 | Preferably | SXQXQPXPQXQXPLL | 234 | | | | |
| | Key | XXXXXPXPQXQXPXX | 235 | | | | |
| | More preferably | QPFPQQQQP | 236 | | | | |
| | Preferably | QPFPQQQ | 237 | | | | |
| | Key | PFPQ | 238 | | | | |
| P19 | Preferably | XQQXQXXPQQQQPXX | 239 | | | | |
| | Key | XXXXXXXPQQQQXXX | 240 | | | | |
| | More preferably | QQQQPFPQQQ | 241 | | | | |
| | Preferably | QQPFPQQQ | 242 | | | | |
| | Key | QQPFP | 243 | | | | |
| | Preferably | QQQPLLLQQ | 244 | | | | |
| | Key | QQQXXXLQQ | 245 | | | | |
| P21 | Key | QQPFPQQ | 246 | | | | |
| P22 | Preferably | QPFPQQQ | 247 | | | | |
| | Key | QPFPQQ | 248 | | | | |
| P24 | Preferably | XQQQQXFPQQXXXXX | 249 | | | | |
| | Key | XXQQXXFPQQXXXXX | 250 | | | | |
| | More preferably | QQPFPQQ | 251 | | | | |
| | Preferably | QQXFPQQ | 252 | | | | |
| | Key | QXXFPQQ | 253 | | | | |
| P26 | Key | SQQXQPXPQQQQPXX | 254 | | | | |
| | More preferably | QQPFPQQQ | 255 | | | | |
| | Preferably | QPFPQQQ | 256 | | | | |
| | Key | QPXPQQQ | 257 | | | | |
| | Key | FPQQ | 258 | | | | |
| P27 | | | 259 | | | | |
| P28 | Preferably | XQQQQXXPQQQQPLL | 260 | | | | |
| | Key | XXXXQXXPQQQQPLL | 261 | | | | |
| | Preferably | QPFPQQQQP | 262 | | | | |
| | Key | QPFPQQQ | 263 | | | | |
| P31 | More preferably | XXXXQX FPQQQQPLL | 264 | | | | |
| | Preferably | XXXXXXXPQQQQPLL | 265 | | | | |
| | Key | XXXXXXXXXQQQPXX | 266 | | | | |
| | Kev | QQPFPQQQ | 267 | | | | |
| P32 | Preferably | XXQQQXFPQQQXXXX | 268 | Wheat | 1 | SQQQQPFPQQQQPLL | 191 |
| | | | | Orchard grass | | QHQQQYYPQQQAFFL | 2881 |
| | | | 269 | | | | |
| | More preferably | QQPFPQQQ | 270 | | | | |
| | Preferably | QPFPQQQ | 271 | | | | |
| | Key | QPFP | 272 | | | | |
| P33 | | | 273 | | | | |
| | Key | QPFPQQQ | 274 | | | | |
| P35 | Preferably | XXXXXXFPQQQQPXL | 275 | | | | |
| | Key | XXXXXXXPQXXQPXL | 276 | | | | |
| | Preferably | QQPFPQQQ | 277 | | | | |
| | Key | QPFPQQQ | 278 | | | | |
| P36 | Key | QQPFPQQ | 279 | | | | |
| P52 | Key | XQXXQPIPXQXXXXX | 280 | | | | |

E4
Spot No. 7

| | | | | Food in which | | | |
|---|---|---|---|---|---|---|---|
| | | | SEQ ID | cross-reactivity | Graph | | SEQ ID |
| Protein name | Gamma gliadin-A1 M9TG60 | | NO | was confirmed | No. | Synthetic sequence | NO |
| 15-residue | QQPQQPFPQQQQPLI (positions 171-185 of | | 281 | | | | |
| sequence | SEQ ID NO: 14) | | | | | | |
| P2 | More preferably | QQPQQXXPQQXXXXX | 282 | | | | |
| | Preferably | QXPQQXXPQQXXXXX | 283 | | | | |
| | Key | QXXQQXXPQQXXXXX | 284 | | | | |
| | Further preferably | QPFPQQQQP | 285 | | | | |
| | More preferably | QPFPQQQQ | 286 | | | | |
| | Preferably | QPFPQQQ | 287 | | | | |
| | Key | QXXPQQX | 288 | | | | |
| P4 | Key | XXPQQXFPQQXXXXX | 289 | | | | |
| | More preferably | QQPFPQQQ | 290 | | | | |
| | Preferably | QPFPQQ | 291 | | | | |
| | Key | QXFPQQ | 292 | | | | |
| P7 | Preferably | QPQQPQQP | 293 | | | | |
| | Key | QPQQP | 294 | | | | |
| | Preferably | QPFPQQQQPL | 295 | | | | |
| | Key | QPFPQQQQP | 296 | | | | |
| P12 | Key | QPFPQQQ | 297 | | | | |
| P14 | Key | XXXQQXXPQQQXXXX | 298 | | | | |
| | Key | QPFPQQQ | 299 | | | | |
| P15 | Key | XXPQQXXPQQQXXXX | 300 | | | | |
| | More preferably | QPFPQQQQ | 301 | | | | |
| | Preferably | PFPQQQ | 302 | | | | |
| | Key | XXPQQQX | 303 | | | | |
| P19 | Preferably | XQPQQXXPQQXXXLI | 304 | | | | |
| | Key | XQPQQXXPQQXXXXX | 305 | | | | |
| | Key | QPFPQQQQ | 306 | | | | |
| P21 | Preferably | QQPFPQQ | 307 | | | | |
| | Key | QPFPQQ | 308 | | | | |
| P22 | Key | XQPQQXXPXQQXPXX | 309 | | | | |
| | Preferably | QPFPQQQQP | 310 | | | | |
| | Key | QPFPQQQ | 311 | | | | |
| P24 | Key | XXPQQXXXQQXXXXX | 312 | | | | |
| | More preferably | QQPQQPFPQQ | 313 | | | | |
| | Preferably | QQPFPQQQQ | 314 | | | | |
| | Key | QPFPQQ | 315 | | | | |
| P26 | Key | XXPQQXXXXQXXXXX | 316 | | | | |
| | Preferably | QPFPQQQ | 317 | | | | |
| | Key | QPFPQQ | 318 | | | | |
| P27 | Key | QQPQQPFPQQQQPXX | 319 | | | | |
| | Preferably | QPFPQQQQ | 320 | | | | |
| | Key | QPFPQQQ | 321 | | | | |
| P28 | Key | XXPQQXXPQQQXXXX | 322 | | | | |
| | Key | QPFPQQQQ | 323 | | | | |
| P32 | Key | XXXXQXXPQQQXXXX | 324 | | | | |
| | More preferably | QPFPQQQ | 325 | | | | |
| | Preferably | QPFPQQ | 326 | | | | |
| | Key | PFPQQ | 327 | | | | |
| P33 | Key | XXXXQXXPQQQXXXX | 328 | | | | |
| | More preferably | QPQQPFPQQQ | 329 | | | | |
| | Preferably | QPFPQQQQP | 330 | | | | |
| | Key | QPFPQQQ | 331 | | | | |
| P34 | Key | XXXQQXFXQQQXXXX | 332 | | | | |
| | Preferably | PQQPFPQQQQ | 333 | | | | |
| | Key | PQQPFPQ | 334 | | | | |
| | Key | FPQQQQPLI | 335 | | | | |
| P35 | Preferably | XXPQQXFPQXXXXXX | 336 | | | | |
| | Key | XXXQQXFPQXXXXXX | 337 | | | | |
| | Preferably | QPFPQQQ | 338 | | | | |
| | Key | QPFPQQ | 339 | | | | |
| P36 | Preferably | QQPFPQQQQP | 340 | | | | |
| | Key | QPFPQQQ | 341 | | | | |
| P50 | | | 342 | | | | |
| P52 | Preferably | QPQQPFP | 343 | | | | |
| | Key | QXXQPFX | 344 | | | | |
| | Key | QPFP | 345 | | | | |

E5
Spot No. 3

| | | | | Food in which | | | |
|---|---|---|---|---|---|---|---|
| | | | SEQ ID | cross-reactivity | Graph | | SEQ ID |
| Protein name | Gamma-gliadin P08453 | | NO | was confirmed | No. | Synthetic sequence | NO |
| 15-residue | PQQSFPQQQRPFIQP (positions 161-175 of | | 346 | | | | |
| sequence | SEQ ID NO: 6) | | | | | | |
| P2 | Preferably | QSFPQQQRP | 347 | | | | |
| | Key | QSFPQQQR | 348 | | | | |
| P3 | Preferably | QQSFPQQQ | 349 | | | | |
| | Key | QSFPQQ | 350 | | | | |
| | Key | RPFIQ | 351 | | | | |
| P7 | Preferably | QSFPQQQR | 352 | | | | |
| | Key | QSFPQQQ | 353 | | | | |
| | Key | QQQRPFIQP | 354 | | | | |
| P8 | Preferably | SFPQQQR | 355 | | | | |
| | Key | SFPQQQ | 356 | Wheat/barley | 3 | SFPQQQ | 2882 |
| P9 | Preferably | QSFPQQQ | 357 | | | | |
| | Key | SFPQQQ | 358 | | | | |
| | Preferably | QQQRPFIQP | 359 | | | | |
| | Key | RPFIQP | 360 | | | | |
| P10 | Key | QSFPQQQ | 361 | | | | |
| | Key | RPFIQP | 362 | | | | |
| P12 | More preferably | QSFPQQQRP | 363 | | | | |
| | Preferably | QSFPQQQ | 364 | | | | |
| | Key | SFPQQQ | 365 | | | | |
| | Key | RPFIQP | 366 | | | | |
| P13 | Preferably | QSFPQQQRP | 367 | | | | |
| | Key | QSFPQQ | 368 | | | | |
| P14 | Preferably | QPQQSFPQQQ | 369 | | | | |
| | Key | QXXQXXXQQQ | 370 | | | | |
| | Preferably | QSFPQQQ | 371 | | | | |
| | Key | QSFPQQ | 372 | | | | |
| | Key | QSFPQQQRPF | 373 | | | | |
| P15 | Preferably | QQSFPQQQRP | 374 | | | | |
| | Key | QSFPQQQ | 375 | | | | |
| P17 | Key | RPFIQP | 376 | | | | |
| P19 | Preferably | QSFPQQQR | 377 | | | | |
| | Key | QSFPQQQ | 378 | | | | |
| P21 | More preferably | QQSFPQQQRP | 379 | | | | |
| | Preferably | QSFPQQQ | 380 | | | | |
| | Key | QSFP | 381 | | | | |
| P22 | Key | XXQXXXQQQRXXXXX | 382 | | | | |
| | More preferably | QSFPQQQRP | 383 | | | | |
| | Preferably | QSFPQQQR | 384 | | | | |
| | Key | QXXXQQQR | 385 | | | | |
| | Further preferably | PQQQRPFIQP | 386 | | | | |
| | More preferably | RPFIQPSLQQ | 387 | | | | |
| | Preferably | RPFIQPSLQ | 388 | | | | |
| | Key | RPFIQP | 389 | | | | |
| P24 | Key | XXQXXXQQQXPXXXX | 390 | | | | |
| | Key | PQQSFPQQQR | 391 | | | | |
| | Preferably | PQQQRPFIQP | 392 | | | | |
| | Key | XQQQXPXXXX | 393 | | | | |
| P25 | Key | QSFP | 394 | | | | |
| | Key | RPFIQPS | 395 | | | | |
| P26 | Preferably | QSFPQQQ | 396 | | | | |
| | Key | QSFP | 397 | | | | |
| | Key | RPFIQ | 398 | | | | |
| P27 | | | 399 | | | | |
| P28 | Key | QSFP | 400 | | | | |
| | Preferably | PQQQRPFIQ | 401 | | | | |
| | Key | QQQRPFIQ | 402 | | | | |
| P31 | Key | QSFP | 403 | | | | |
| P32 | Preferably | QSFPQQQ | 404 | | | | |
| | Key | QSFPQQ | 405 | | | | |
| P33 | Preferably | QSFPQQQRP | 406 | | | | |
| | Key | QSFPQQQ | 407 | | | | |
| P34 | Key | QQSFP | 408 | | | | |
| | Key | RPFIQP | 409 | | | | |
| P35 | Key | SFPQQ | 410 | | | | |
| P36 | Key | QSFPQQQR | 411 | | | | |
| | Key | RPFIQ | 412 | | | | |
| P52 | Key | RPFI | 413 | | | | |

E6
Spot No. 4

| | | | | Food in which | | | |
|---|---|---|---|---|---|---|---|
| | | | SEQ ID | cross-reactivity | Graph | | SEQ ID |
| Protein name | Fructose-b sphosphate aldolase W5CCA9 | | NO | was confirmed | No. | Synthetic sequence | NO |
| 15-residue | KWRAVLKIGATEPSQ (positions 133-147 of | | 414 | | | | |
| sequence | SEQ ID NO: 8) | | | | | | |
| P2 | Preferably | RAVLKIGATE | 415 | | | | |
| | Key | ATEPSQ | 416 | | | | |
| P7 | Preferably | KXRXXXKIGATEPSQ | 417 | | | | |
| | Key | XXXXXXXXGAXEPSQ | 418 | | | | |
| | Preferably | KIGATEPS | 419 | | | | |
| | Key | XXGAXEPS | 420 | | | | |
| P8 | Preferably | WRAVLKIGA | 421 | | | | |
| | Key | RAVLKIG | 422 | | | | |
| P10 | Key | XXXXXXKXXXTXPSQ | 423 | | | | |
| | Key | IGATE | 424 | | | | |
| P12 | Key | XXRXXXKIGATXPSQ | 425 | | | | |
| | Key | AVLKIG | 426 | | | | |
| P14 | More preferably | WRAVLKIGA | 427 | | | | |
| | Preferably | WRAVL | 428 | | | | |
| | Key | RAVL | 429 | | | | |
| | Preferably | KIGATEPSQ | 430 | | | | |
| | Key | ATEPSQ | 431 | | | | |
| P16 | Key | RAVLKIGA | 432 | | | | |
| | Preferably | VLKIGATEPS | 433 | | | | |
| | Key | IGATEPS | 434 | | | | |
| P17 | Key | XXXXXXKXXAXXPSQ | 435 | | | | |
| | Key | KIGATEP | 436 | | | | |
| P19 | Preferably | KIGATEPSQ | 437 | | | | |
| | Key | KXXAXXPXQ | 438 | | | | |
| P20 | Key | XXXXXXKXGAXEXXQ | 439 | | | | |
| | Preferably | KIGATE | 440 | | | | |
| | Key | KXGAXE | 441 | | | | |
| P21 | Key | KWRXXXXXXXXXPSQ | 442 | | | | |
| | More preferably | KWRAVLKIGA | 443 | | | | |
| | Preferably | WRAVLKIG | 444 | | | | |
| | Key | RAVL | 445 | | | | |
| | Preferably | IGATEPSQ | 446 | | | | |
| | Key | ATEPS | 447 | | | | |
| P22 | Preferably | KWRAXXKXXXTEPSQ | 448 | | | | |
| | Key | KXRXXXKXXXXEPSQ | 449 | | | | |
| | More preferably | AKWRAVLKIG | 450 | | | | |
| | Preferably | AKWRAXXKXX | 451 | | | | |
| | Key | AKXRXXXKXX | 452 | | | | |
| | Key | VLKI | 453 | | | | |
| P24 | Key | XXXXXXKXXAXEPSQ | 454 | | | | |
| | More preferably | KIGATEPS | 455 | | | | |
| | Preferably | KIGATEP | 456 | | | | |
| | Key | IGATE | 457 | | | | |
| P27 | Key | KXXXXXKXGXXXPSQ | 458 | | | | |
| | Preferably | WRAVLKIGAT | 459 | | | | |
| | Key | RAVLKIGA | 460 | | | | |
| | Preferably | GATEPSQ | 461 | | | | |
| | Key | GXXXPSQ | 462 | | | | |
| | Key | GATEPS | 463 | | | | |
| P28 | Preferably | KIGATEPS | 464 | | | | |
| | Key | IGATEPS | 465 | | | | |
| P33 | Preferably | KWRXXXXXGATEPSQ | 466 | | | | |
| | Key | KXRXXXXXXXTEPSQ | 467 | | | | |
| | Key | RAVLKI | 468 | | | | |
| P35 | Preferably | XXXXXXKIGAXEPSQ | 469 | | | | |
| | Key | XXXXXXKIXXXXPSQ | 470 | | | | |
| | Preferably | KWRAVLKIGA | 471 | | | | |
| | Key | XXXXXXKIGA | 472 | | | | |
| | Preferably | RAVLKIGATE | 473 | | | | |
| | Key | XXXXKIGAXE | 474 | | | | |
| | Most preferably | VLKIGATEPS | 475 | | | | |
| | Further preferably | LKIGATEPS | 476 | | | | |
| | More preferably | KIGATEPS | 477 | | | | |
| | Preferably | KIGAXEPS | 478 | | | | |
| | Key | KIXXXXPS | 479 | | | | |
| P36 | Key | XXXXXXKXGAXXXXQ | 480 | | | | |
| | Preferably | RAVLKIGA | 481 | | | | |
| | Key | LKIG | 482 | | | | |
| G1 | Key | XXXXXXKXXAXXPSQ | 483 | Wheat/rye/barley | 4 | LKIGATEPSQ | 2883 |
| | Preferably | LKIGATEPSQ | 484 | | | | |
| | Key | XKXXAXXPSQ | 485 | | | | |
| | Preferably | KIGATE | 486 | | | | |
| | Key | IGAT | 487 | Wheat/rye/barley/ | 4 | IGAT | 2884 |
| | | | | timothy/orchard | | | |
| | | | | grass | | | |
| G2 | Key | KWRAVLKIG | 488 | | | | |
| | Key | KIGATEPS | 489 | | | | |
| G7 | More preferably | KWRAVLKIGA | 490 | | | | |
| | Preferably | KIGATE | 491 | | | | |
| | Key | KIGA | 492 | | | | |

E7
Spot No. 5

| | | | | Food in which | | | |
|---|---|---|---|---|---|---|---|
| | | | SEQ ID | cross-reactivity | Graph | | SEQ ID |
| Protein name | Alpha-gliadin Gli2-LM2-12 Q1WA40 | | NO | was confirmed | No. | Synthetic sequence | NO |
| 15-residue | PQQPYPQQQPQYLQP (positions 101-115 of | | 493 | | | | |
| sequence | SEQ ID NO: 10) | | | | | | |
| P2 | Key | PXXXXXQQQPQYLQP | 494 | | | | |
| | Key | QQQP | 495 | | | | |
| P4 | Key | QPYPQQQ | 496 | | | | |
| | Key | YPQQQPQYLQ | 497 | | | | |
| P5 | Key | XXXXXXQQQXQXXXX | 498 | | | | |
| | Key | YPQQ | 499 | | | | |
| P7 | Key | PQQPYPQQQ | 500 | | | | |
| | Preferably | QPYPQQQPQY | 501 | | | | |
| | Key | XXXXQQQPQY | 502 | | | | |
| | Preferably | YPQQQPQYLQ | 503 | | | | |
| | Key | XXQQQPQYXX | 504 | | | | |
| P9 | Key | PQQQP | 505 | | | | |
| P10 | Key | XXXXXXXQQXQYLXX | 506 | | | | |
| P12 | Key | XXXXXXXQQPQYXXX | 507 | | | | |
| P14 | Preferably | QPYPQQQ | 508 | | | | |
| | Key | YPQQQ | 509 | | | | |
| P15 | Key | XXQXXXQQQXQYLXX | 510 | | | | |
| | Preferably | QPYPQQQPQ | 511 | | | | |
| | Key | QPYPQQQ | 512 | | | | |
| | Preferably | YPQQQPQYLQ | 513 | | | | |
| | Key | XXQQQXQYLX | 514 | | | | |
| P17 | Key | XXXXXXXXXXXYLQP | 515 | | | | |
| | Key | PQQPYPQQQP | 516 | | | | |
| | Key | QQQPQY | 517 | | | | |
| P19 | Key | XXXXXXXQQXQXXXP | 518 | | | | |
| | Key | QQPYPQQQPQ | 519 | | | | |
| | Preferably | YPQQQPQYLQ | 520 | | | | |
| | Key | YPQQQP | 521 | | | | |
| P21 | More preferably | YPQQQPQYLQ | 522 | | | | |
| | Preferably | QPYPQQ | 523 | | | | |
| | Key | YPQQ | 524 | | | | |
| P22 | Key | XXQXXPQQQPQYXXX | 525 | | | | |
| | Further preferably | PYPQQQPQYL | 526 | | | | |
| | More preferably | PYPQQQPQ | 527 | | | | |
| | Preferably | XXPQQQPQ | 528 | | | | |
| | Key | XXXQQQPQ | 529 | | | | |
| P24 | Key | XXXXYPQQQPQYXXX | 530 | | | | |
| | More preferably | QQPYPQQQ | 531 | | | | |
| | Preferably | QQPYPQQ | 532 | | | | |
| | Key | XXXYPQQ | 533 | | | | |
| | Preferably | YPQQQPQYLQ | 534 | | | | |
| | Key | YPQQQPQYXX | 535 | | | | |
| P25 | Preferably | XXQXXXXQQXQYLQX | 536 | | | | |
| | Key | XXXXXXXQQXXYLXX | 537 | | | | |
| | Key | QQQP | 538 | | | | |
| P26 | Key | YPQQQ | 539 | | | | |
| P27 | Key | PXQXXXQXXXXYLXX | 540 | | | | |
| P28 | Preferably | XXXXXXXQQPQYLQP | 541 | | | | |
| | Key | XXXXXXXXQXQYLQP | 542 | | | | |
| | Key | PQQPYPQQQ | 543 | | | | |
| | Preferably | YPQQQPQY | 544 | | | | |
| | Key | XXXQQPQY | 545 | | | | |
| P32 | Key | XXQXXXXQXXXYLXX | 546 | | | | |
| | Key | PQQQ | 547 | | | | |
| P33 | Key | XXQXXXQQQPQXXXX | 548 | | | | |
| | More preferably | QPYPQQQ | 549 | | | | |
| | Preferably | YPQQQPQYLQ | 550 | | | | |
| | Key | PQQQ | 551 | | | | |
| P34 | Key | QPQYLQ | 552 | | | | |
| P35 | Key | XXXXXXXQXXQYLXX | 553 | | | | |
| P36 | | | | | | | |
| G4 | Key | XXQPYPQQQPQYXQP | 554 | | | | |
| | Preferably | PQQPYPQQQP | 555 | | | | |
| | Key | XXQPYPQQQP | 556 | | | | |
| | More preferably | YPQQQPQYLQ | 557 | | | | |
| | Preferably | YPQQQPQY | 558 | | | | |
| | Key | XXXQQPQY | 559 | | | | |
| G6 | Key | QQQPQY | 560 | | | | |
| G7 | Key | PQQPYP | 561 | | | | |

E8
Spot No. 9

| | | | | Food in which | | | |
|---|---|---|---|---|---|---|---|
| | | | SEQ ID | cross-reactivity | Graph | | SEQ ID |
| Protein name | LMW-D8(LMW-GS) B2BZD1 | | NO | was confirmed | No. | Synthetic sequence | NO |
| 15-residue | KPSQQQPLPLQQLLW (positions 31-45 of SEQ | | 562 | | | | |
| sequence | ID NO: 18) | | | | | | |
| P2 | Key | XXXQQQXXXLQQXXX | 563 | | | | |
| | Key | KPSQQQ | 564 | | | | |
| | Preferably | QQPLPLQQ | 565 | | | | |
| | Key | QQXXXLQQ | 566 | | | | |
| P7 | Preferably | PSQQQ | 567 | | | | |
| | Key | SQQQ | 568 | | | | |
| P9 | Key | SQQQPLPL | 569 | | | | |
| P10 | Key | XXXXQQXXPLQQXXX | 570 | | | | |
| | Further preferably | QPLPLQQIL | 571 | | | | |
| | More preferably | QPLPLQQI | 572 | | | | |
| | Preferably | QXXPLQQX | 573 | | | | |
| | Key | QXXXLQQX | 574 | | | | |
| P14 | More preferably | XXXXQQPXPLQQXXX | 575 | | | | |
| | Preferably | XXXXQQXXPLQQXXX | 576 | | | | |
| | Key | XXXXXQXXPLQQXXX | 577 | | | | |
| | Preferably | QPLPLQQ | 578 | | | | |
| | Key | PLQQ | 579 | | | | |
| P15 | Preferably | XXXQXQPXPLQQIXX | 580 | | | | |
| | Key | XXXXXQPXPLQQIXX | 581 | | | | |
| | More preferably | QPLPLQQ | 582 | | | | |
| | Preferably | QPXPLQQ | 583 | | | | |
| | Key | QXXPLQQ | 584 | | | | |
| P17 | Preferably | XXXXXQPXPLQQXXX | 585 | | | | |
| | Key | XXXXXXPXPLQQXXX | 586 | | | | |
| | Key | LEKPSQQQPL | 587 | | | | |
| | Key | KPSQQQ | 588 | | | | |
| | More preferably | QQPLPLQQ | 589 | | | | |
| | Preferably | XQPXPLQQ | 590 | | | | |
| | Key | XXPXPLQQ | 591 | | | | |
| P21 | Key | KXXXXQXXXLQXXXX | 592 | | | | |
| P22 | Preferably | XXSQQQXXPLQQXXX | 593 | | | | |
| | Key | XXXXQQXXPLQQXXX | 594 | | | | |
| | Further preferably | QQPLPLQQI | 595 | | | | |
| | More preferably | QPLPLQQ | 596 | | | | |
| | Preferably | QXXPLQQ | 597 | | | | |
| | Key | QXXPLQX | 598 | | | | |
| P24 | Key | KXSQQQXXXXXXXXX | 599 | | | | |
| | Preferably | KPSQQQ | 600 | | | | |
| | Key | SQQQ | 601 | | | | |
| P25 | Preferably | KPSXQQPLPLQQXXX | 602 | | | | |
| | Key | XXXXXQPLPLQQXXX | 603 | | | | |
| | Preferably | QPLPLQQ | 604 | | | | |
| | Key | QPXPLQQ | 605 | | | | |
| P26 | Preferably | XXSQQQPXPLQQIXX | 606 | | | | |
| | Key | XXXQQQXXPLQQXXX | 607 | | | | |
| | More preferably | QPLPLQQ | 608 | | | | |
| | Preferably | QPXPLQQ | 609 | | | | |
| | Key | QXXPLQQ | 610 | | | | |
| | Key | PLQQ | 611 | | | | |
| P27 | More preferably | XPXQXQPLPLQQLLX | 612 | | | | |
| | Preferably | XXXXXQPLPLQQLLX | 613 | | | | |
| | Key | XXXXXQPLPLQQIXX | 614 | | | | |
| | Preferably | KPSQQQPL | 615 | | | | |
| | Key | KPSQQQ | 616 | | | | |
| | Preferably | QQPLPLQQ | 617 | | | | |
| | Key | XQPLPLQQ | 618 | | | | |
| P28 | Preferably | XXSQQQPXPLQQIXX | 619 | | | | |
| | Key | XXXXXQPXPLQQXXX | 620 | | | | |
| | Most preferably | QPLPLQQI | 621 | | | | |
| | Further preferably | QPLPLQQ | 622 | | | | |
| | More preferably | QPXPLQQ | 623 | | | | |
| | Preferably | QPXPLQQ | 624 | | | | |
| | Key | QXXPLQQ | 625 | | | | |
| P32 | More preferably | XXXXQQPLPLQQXXX | 626 | | | | |
| | Preferably | XXXXXQXLPLQQXXX | 627 | | | | |
| | Key | XXXXXQXXXLQQXXX | 628 | | | | |
| | Key | PLQQ | 629 | | | | |
| P33 | Key | XXXXXQXXXLQQXXX | 630 | | | | |
| | Key | QPLPLQQ | 631 | | | | |
| P34 | Key | KPSQQQPLP | 632 | | | | |
| P35 | Key | SQQQ | 633 | | | | |
| | Key | LQQIL | 634 | | | | |
| P36 | Preferably | KXXXQQXXPLQQXXX | 635 | | | | |
| | Key | XXXXXQXXXLQQXXX | 636 | | | | |
| | Key | KPSQQQ | 637 | | | | |
| | Preferably | PLQQI | 638 | | | | |
| | Key | LQQI | 639 | | | | |

E9
Spot No. 1, 5, 6

| | | | | Food in which | | | |
|---|---|---|---|---|---|---|---|
| | | | SEQ ID | cross-reactivity | Graph | | SEQ ID |
| Protein name | Alpha/beta-gliadin MM1 P18573 | | NO | was confirmed | No. | Synthetic sequence | NO |
| 15-residue | QVPLVQQQQFPGQQQ (positions 41- | | 640 | | | | |
| sequence | 55 of SEQ ID NOs: 2, 10 and 12) | | | | | | |
| P2 | Key | PLVQ | 641 | | | | |
| | Key | QQQFPGQQQ | 642 | | | | |
| P3 | More preferably | QVPLVQQ | 643 | | | | |
| | Preferably | QVPLVQ | 644 | | | | |
| | Key | QXXLXQQ | 645 | | | | |
| P7 | Key | QXXXVQQXXXXXXXX | 646 | | | | |
| | More preferably | QEQVPLVQQ | 647 | | | | |
| | Preferably | EQVPLVQ | 648 | | | | |
| | Key | EQXXXVQ | 649 | | | | |
| | Key | QVPLVQ | 650 | | | | |
| | Key | QQQFPGQQQ | 651 | | | | |
| P8 | Key | QXXLVQQXXXXXXXX | 652 | | | | |
| | More preferably | QVPLVQQ | 653 | | | | |
| | Preferably | PLVQQ | 654 | Wheat/rye | 2 | PLVQQ | 2886 |
| | Key | XLVQQ | 655 | Wheat/barley | 2 | KLVQQ | 2887 |
| | Preferably | QQQQFPGQQQ | 656 | | | | |
| | Key | QQFPGQQQ | 657 | Wheat/rye | 3 | QQFPGQQQ | 2888 |
| P12 | Key | QXXXVQQXXXXXXXX | 658 | | | | |
| | Preferably | QVPLVQQ | 659 | | | | |
| | Key | QXXXVQQ | 660 | | | | |
| | Preferably | QVPLVQ | 661 | | | | |
| | Key | VPLVQ | 662 | | | | |
| | Key | QQFPGQQQ | 663 | | | | |
| P14 | More preferably | QQQQFPGQQQ | 664 | | | | |
| | Preferably | QQQFPGQQQ | 665 | | | | |
| | Key | QQFPGQQ | 666 | | | | |
| P17 | Preferably | FPGQQQP | 667 | | | | |
| | Key | FPGQQQ | 668 | | | | |
| P19 | Key | XXXXXQQQXXXXXQQ | 669 | Wheat/rye/ | 2 | QVPLVQQQQFPGQQQ | 640 |
| | | | | orchard grass | 2 | QQYYPQQQAFFLLQQ | 2885 |
| | More preferably | QEQVPLVQQQ | 670 | | | | |
| | Preferably | EQVPLVQQQ | 671 | | | | |
| | Key | EXXXXXQQQ | 672 | | | | |
| | Preferably | PLVQQQQFP | 673 | | | | |
| | Key | LVQQ | 674 | | | | |
| | Preferably | QQFPGQQQ | 675 | | | | |
| | Key | QFPGQQQ | 676 | | | | |
| P21 | Preferably | QVPLVQQ | 677 | | | | |
| | Key | QVPLVQ | 678 | | | | |
| | Key | QQFPGQQQ | 679 | | | | |
| P22 | Key | FPGQ | 680 | | | | |
| P24 | Preferably | QXPXVQQQQFPXQQQ | 681 | | | | |
| | Key | QXPXVQQXXXXXXQQ | 682 | | | | |
| | Preferably | QFPGQQQ | 683 | | | | |
| | Key | QFPXQQQ | 684 | | | | |
| P26 | Key | QVPLVQ | 685 | | | | |
| | Key | FPGQQ | 686 | | | | |
| P28 | Key | XXXXXQXQXXPXQXQ | 687 | | | | |
| | Key | PLVQQQQFPG | 688 | | | | |
| | Preferably | QQFPGQQQ | 689 | | | | |
| | Key | QXXPXQXQ | 690 | | | | |
| P32 | Key | XXPXXXXXQXXXQQQ | 691 | | | | |
| | Preferably | QQQQFPGQQQ | 692 | | | | |
| | Key | QQQFPGQQ | 693 | | | | |
| P33 | Key | VPLVQ | 694 | | | | |
| | Key | FPGQQ | 695 | | | | |
| P34 | Key | PLVQ | 696 | | | | |
| | Key | QQQFPGQQQ | 697 | | | | |
| P35 | More preferably | FPGQQQPFP | 698 | | | | |
| | Preferably | FPGQQQPF | 699 | | | | |
| | Key | FPGQQQ | 700 | | | | |
| P36 | Preferably | PLVQQQQF | 701 | | | | |
| | Key | PLVQQ | 702 | | | | |
| | Key | FPGQQQ | 703 | | | | |
| P50 | Key | PLVQQQQFP | 704 | | | | |
| | Key | QQQFPGQQ | 705 | | | | |

E10
Spot No. 4

| | | | | Food in which | | | |
|---|---|---|---|---|---|---|---|
| | | | SEQ ID | cross-reactivity | Graph | | SEQ ID |
| Protein name | Fructose-b sphosphate aldolase W5CCA9 | | NO | was confirmed | No. | Synthetic sequence | NO |
| 15-residue | VLLFEETLYQSTKGG (positions 63-77 of | | 706 | | | | |
| sequence | SEQ ID NO: 8) | | | | | | |
| P2 | Key | XXXXXXXXYXXTKXG | 707 | | | | |
| | Preferably | QSTKGG | 708 | | | | |
| | Key | QSTKG | 709 | | | | |
| P3 | Preferably | QSTKGG | 710 | | | | |
| | Key | QSTKG | 711 | | | | |
| P8 | Key | LLFEETLYQS | 712 | Wheat/rye/barley | 3 | LLFEETLYQS | 2889 |
| | Preferably | QSTKGG | 713 | Wheat/rye/barley | 3 | QSTKG | 2890 |
| | Key | QSTKG | 714 | | | | |
| P10 | Key | XXXXXXXXYXSTKGG | 715 | | | | |
| | Key | QSTK | 716 | | | | |
| P12 | Preferably | QSTKGG | 717 | | | | |
| | Key | QSTKG | 718 | | | | |
| P14 | Key | XXXXXXXXYXSXKXG | 719 | | | | |
| | Key | QSTKGG | 720 | | | | |
| P16 | Preferably | QSTKGG | 721 | | | | |
| | Key | QSTK | 722 | | | | |
| P17 | Key | QSTK | 723 | | | | |
| P19 | Key | LLFEETLY | 724 | | | | |
| | Key | QSTKG | 725 | | | | |
| P21 | Key | LLFEETLYQS | 726 | | | | |
| | More preferably | QSTKGG | 727 | | | | |
| | Preferably | QSTKG | 728 | | | | |
| | Key | QSTK | 729 | | | | |
| P22 | Preferably | XXXXXXXXYQSTKGG | 730 | | | | |
| | Key | XXXXXXXXYXSXKGG | 731 | | | | |
| | Key | VLLFEETLY | 732 | | | | |
| | Preferably | QSTKGG | 733 | | | | |
| | Key | QSTKG | 734 | | | | |
| P24 | Preferably | VLLFEETLY | 735 | | | | |
| | Key | LLFEETLY | 736 | | | | |
| | More preferably | QSTKGG | 737 | | | | |
| | Preferably | QSTKG | 738 | | | | |
| | Key | QSTK | 739 | | | | |
| P26 | Preferably | XXXXXXXLYXSTKGG | 740 | | | | |
| | Key | XXXXXXXXYXXTKGG | 741 | | | | |
| | More preferably | QSTKGG | 742 | | | | |
| | Preferably | XSTKGG | 743 | | | | |
| | Key | XXTKGG | 744 | | | | |
| | Key | QSTK | 745 | | | | |
| P27 | Preferably | QSTKG | 746 | | | | |
| | Key | QSTK | 747 | | | | |
| P29 | Preferably | QSTKGG | 748 | | | | |
| | Key | QSTKG | 749 | | | | |
| P30 | Preferably | QSTKGG | 750 | | | | |
| | Key | QSTKG | 751 | | | | |
| P31 | Preferably | QSTKGG | 752 | | | | |
| P32 | Key | QSTKG | 753 | | | | |
| | Key | XXXXXXXXYXSXKGX | 754 | | | | |
| | Key | LLFEETLYQS | 755 | | | | |
| | Preferably | QSTKGGK | 756 | | | | |
| | Key | QSTKGG | 757 | | | | |
| P33 | Key | VLLFEETLYQ | 758 | | | | |
| | Preferably | QSTKGG | 759 | | | | |
| | Key | QSTKG | 760 | | | | |
| P34 | Key | XIXFXXXXYXSTKGG | 761 | | | | |
| | Preferably | QSTKGG | 762 | | | | |
| | Key | XSTKGG | 763 | | | | |
| | Key | QSTKG | 764 | | | | |
| P35 | Key | QSTKGG | 765 | | | | |
| P36 | Key | XXXXXXXXYXXTKXG | 766 | | | | |
| | Preferably | QSTKGG | 767 | | | | |
| | Key | QSTKG | 768 | | | | |
| G1 | Key | XXXXXXXLYQSTKGG | 769 | | | | |
| | Preferably | QSTKG | 770 | Wheat/rye/barley | 4 | QSTK | 2891 |
| | Key | QSTK | 771 | | | | |
| G7 | Key | XXXXXXXXYXXTKGG | 772 | | | | |
| | Key | VLLFEETLYQ | 773 | | | | |
| | Preferably | QSTKG | 774 | | | | |
| | Key | QSTK | 775 | | | | |

E11
Spot No. 1,5,6,14

| | | | | Food in which | | | |
|---|---|---|---|---|---|---|---|
| | | | SEQ ID | cross-reactivity | Graph | | SEQ ID |
| Protein name | Alpha-gliadin (Fragment) A0A0E3Z522 | | NO | was confirmed | No. | Synthetic sequence | NO |
| 15-residue | QPYPQPQPFPSQQPY (positions 61-75 of SEQ | | 776 | | | | |
| sequences | ID NOs. 2, 10, 12 and 28) | | | | | | |
| P3 | Preferably | XXXXQPQPFPSQQXX | 777 | | | | |
| | Key | XXXXXXXPFPXQXXX | 778 | | | | |
| | Key | PQPQPFP | 779 | | | | |
| P4 | Preferably | QPYXXXXPXPSQXPY | 780 | | | | |
| | Key | XPYXXXXXXPXQXXY | 781 | | | | |
| | Preferably | PQPQPFPSQ | 782 | | | | |
| | Key | XXXXPXPSQ | 783 | | | | |
| | Preferably | PQPQPFP | 784 | | | | |
| | Key | QPFP | 785 | | | | |
| P5 | Preferably | XPYXQPXPFPSXXXX | 786 | | | | |
| | Key | XXXXQPXXXPSXXXX | 787 | | | | |
| | More preferably | QPQPFP | 788 | | | | |
| | Preferably | QPQPF | 789 | | | | |
| | Key | QPXPF | 790 | | | | |
| P7 | Preferably | XPYXQPXXFPSQXPY | 791 | | | | |
| | Key | XXYXQXXXXPSQXPY | 792 | | | | |
| | Further preferably | YPQPQPFPSQ | 793 | | | | |
| | More preferably | PQPQPFPSQ | 794 | | | | |
| | Preferably | XQPXXFPSQ | 795 | | | | |
| | Key | XQXXXXPSQ | 796 | | | | |
| | Most preferably | PQPFPSQQPY | 797 | | | | |
| | Further preferably | PFPSQQPYLQ | 798 | | | | |
| | More preferably | FPSQQPY | 799 | | | | |
| | Preferably | FPSQXPY | 800 | | | | |
| | Key | XPSQXPY | 801 | | | | |
| P8 | Preferably | QPYXXPQPFPSQQPY | 802 | | | | |
| | Key | XPYXXPQPFPSQQPY | 803 | | | | |
| | Preferably | PQPQPFP | 804 | | | | |
| | Key | XXPQPFP | 805 | Wheat/rye/barley | 3 | PQPQPFP | 2892 |
| P9 | Preferably | XPYXXXXXFPSQQXX | 806 | | | | |
| | Key | XXYXXXXXXPSQQXX | 807 | | | | |
| | Preferably | PQPQPFP | 808 | | | | |
| | Key | QPQPF | 809 | | | | |
| P10 | Key | XXYXXXQPXPXQQXX | 810 | | | | |
| | Key | PQPQPFP | 811 | | | | |
| P12 | Preferably | QPYPQPQPXPSQQPY | 812 | | | | |
| | Key | XXYXXXQPXPSQQXY | 813 | | | | |
| | Further preferably | PQPQPFPSQ | 814 | | | | |
| | More preferably | QPQPFPS | 815 | | | | |
| | Preferably | QPQPXPS | 816 | | | | |
| | Key | XXQPXPS | 817 | | | | |
| P14 | Key | XXYXQXXXXPSQQXY | 818 | | | | |
| | Key | QPFPSQ | 819 | | | | |
| P15 | Preferably | XPYXQPQPXPSQQXY | 820 | | | | |
| | Key | XXXXXXXPXPSQQXY | 821 | | | | |
| | Further preferably | YPQPQPFPSQ | 822 | | | | |
| | More preferably | PQPQPFPSQ | 823 | | | | |
| | Preferably | XQPQPXPSQ | 824 | | | | |
| | Key | XXXXPXPSQ | 825 | | | | |
| P19 | Key | XXYXXXXXXPSQQXX | 826 | | | | |
| | Key | YPQPQPFP | 827 | | | | |
| | Preferably | QPFPSQQPYL | 828 | | | | |
| | Key | XXXPSQQXXL | 829 | | | | |
| P21 | Preferably | QPYXQXQPXPSQQXX | 830 | | | | |
| | Key | XXYXXXQXXPSQQXX | 831 | | | | |
| | Preferably | PQPQPFP | 832 | | | | |
| | Key | QPQPF | 833 | | | | |
| P22 | Key | XPXXQPQXFPXQQXX | 834 | | | | |
| P24 | Preferably | XPYXXPQPFPSQXXX | 835 | | | | |
| | Key | XXYXXXQPXPSXXXX | 836 | | | | |
| | Further preferably | PQPQPFPS | 837 | | | | |
| | More preferably | QPQPFPS | 838 | | | | |
| | Preferably | XPQPFPS | 839 | | | | |
| | Key | XXQPXPS | 840 | | | | |
| | Key | PQPF | 841 | | | | |
| P26 | Preferably | XXYXXXXPXPSQQPY | 842 | | | | |
| | Key | XXYXXXXXXPSQQXY | 843 | | | | |
| | Preferably | PQPQPFP | 844 | | | | |
| | Key | PQPQPF | 845 | | | | |
| P27 | Preferably | QPYXQPQPFPSQQPY | 846 | | | | |
| | Key | XPYXQPQPFPSQQPY | 847 | | | | |
| | Key | QPFPS | 848 | | | | |
| P28 | Preferably | QPYXXPQPFPXQQXY | 849 | | | | |
| | Key | QPYXXXXPXPXQQXX | 850 | | | | |
| | More preferably | PQPQPFP | 851 | | | | |
| | Preferably | QPQPFP | 852 | | | | |
| | Key | XPQPFP | 853 | | | | |
| P29 | Preferably | XPYXQPQPFPSXQPY | 854 | | | | |
| | Key | XXYXQPQPFPSXQPY | 855 | | | | |
| | More preferably | YPQPQPFPS | 856 | | | | |
| | Preferably | PQPQPFP | 857 | | | | |
| | Key | XQPQPFP | 858 | | | | |
| P30 | Preferably | XPYXQPQPFPSQQPY | 859 | | | | |
| | Key | XXYXXXXPFPXQQPY | 860 | | | | |
| | More preferably | YPQPQPFPS | 861 | | | | |
| | Preferably | PQPQPFP | 862 | | | | |
| | Key | XQPQPFP | 863 | | | | |
| P32 | Preferably | XXYXXPQPFPSQQXY | 864 | | | | |
| | Key | XXXXXXXXXPXQQXY | 865 | | | | |
| | More preferably | QPQPFPSQ | 866 | | | | |
| | Preferably | QPQPF | 867 | | | | |
| | Key | XPQPF | 868 | | | | |
| P33 | Key | XPYXXPQPXXSQQXX | 869 | | | | |
| | Key | PQPQPF | 870 | | | | |
| P34 | Preferably | QPXPQPQPFPXQQPY | 871 | | | | |
| | Key | QPXXXPQPFPXQQPY | 872 | | | | |
| | Preferably | PYPQPQPFP | 873 | | | | |
| | Key | PXXXPQPFP | 874 | | | | |
| | Key | PQPQP | 875 | | | | |
| P35 | Key | XXYXXPXPFPSQQXY | 876 | | | | |
| | Preferably | YPQPQPFPSQ | 877 | | | | |
| | Key | YXXPXPFPSQ | 878 | | | | |
| | Preferably | QPFPSQQP | 879 | | | | |
| | Key | XPFPSQQX | 880 | | | | |
| P50 | Key | XXYXXXQPFPSQQPX | 881 | | | | |
| | Key | QPQP | 882 | | | | |
| P52 | Preferably | QXYXQPXPFXXXXXX | 883 | | | | |
| | Key | XXXXQPXPFXXXXXX | 884 | | | | |
| | Key | PQPFPS | 885 | | | | |
| G6 | Preferably | XPYXXPQPFPSQXXX | 886 | | | | |
| | Key | XPYXXPQPFPXXXXX | 887 | | | | |
| | Preferably | PQPQPFP | 888 | | | | |
| | Key | XXPQPFP | 889 | | | | |
| G7 | Preferably | QPYPQPQPFPSXQPX | 890 | | | | |
| | Key | XPYPQPXPFPSXQXX | 891 | | | | |
| | Key | YPQP | 892 | | | | |
| G9 | Preferably | XXYXXPXXFXXQQPY | 893 | | | | |
| | Key | XXXXXXXXXXXQQPY | 894 | | | | |
| | Preferably | PQPQPFP | 895 | | | | |
| | Key | PQPQPF | 896 | | | | |
| | Preferably | PSQQPY | 897 | | | | |
| | Key | XXQQPY | 898 | | | | |

E12
Spot No. 8

| | | | | Food in which | | | |
|---|---|---|---|---|---|---|---|
| | | | SEQ ID | cross-reactivity | Graph | | SEQ ID |
| Protein name | Alpha/beta-gliadin I0IT53 | | NO | was confirmed | No. | Synthetic sequence | NO |
| 15-residue | LGQQQQQFPGQQQPF (positions 51-65 of | | 899 | | | | |
| sequences | SEQ ID NO: 16) | | | | | | |
| P2 | Key | XXXXQQQXXXQQQXX | 900 | | | | |
| | Key | LGQQQQQFPG | 901 | | | | |
| | Preferably | QQQQFPGQQQ | 902 | | | | |
| | Key | XQQQXXXQQQ | 903 | | | | |
| | Preferably | QQFPGQQQPF | 904 | | | | |
| | Key | QQXXXQQQXX | 905 | | | | |
| P7 | Key | XXQQQQQXXXXQXXX | 906 | | | | |
| | More preferably | QQQQQFPGQQ | 907 | | | | |
| | Preferably | QQQQFPGQ | 908 | | | | |
| | Key | QQQQXXXX | 909 | | | | |
| | Preferably | QQFPGQQQPF | 910 | | | | |
| | Key | QFPG | 911 | | | | |
| P8 | Key | XXQQQXQXPXXQXXX | 912 | | | | |
| | Preferably | QQFLGQQQQ | 913 | | | | |
| | Key | QQFXXQQQX | 914 | Wheat/rye | 3 | QQFPGQQQP | 2893 |
| | Preferably | QQQFPGQQQ | 915 | | | | |
| | Key | QXQXPXXQX | 916 | | | | |
| | Key | QQFPG | 917 | Wheat/rye | 3 | QQFPG | 2895 |
| P10 | Key | LXQQQXXXXXXXXXX | 918 | | | | |
| | Key | LGQQQQQFPG | 919 | | | | |
| | Key | QQQQQFPGQQ | 920 | | | | |
| | Key | QQFPGQQQPF | 921 | | | | |
| P12 | Key | XXXQQQQXXXXQXXX | 922 | | | | |
| | Preferably | LGQQQQQFPG | 923 | | | | |
| | Key | XXXQQQQXXX | 924 | | | | |
| | Preferably | QQFPGQQQ | 925 | | | | |
| | Key | FPGQQ | 926 | | | | |
| P14 | Preferably | XXQQQQQXXXQQXXX | 927 | | | | |
| | Key | XXXXQQQXXXXQXXX | 928 | | | | |
| | Preferably | QQFPGQQQ | 929 | | | | |
| | Key | QQFPGQQ | 930 | | | | |
| P19 | Preferably | XXQQQQQXXXXQQXX | 931 | | | | |
| | Key | XXXXQQQXXXXQQXX | 932 | | | | |
| | More preferably | QQQFPGQQQP | 933 | | | | |
| | Preferably | QQFPGQQQ | 934 | | | | |
| | Key | QQXXXXQQ | 935 | | | | |
| P21 | Key | LXXXQQXXXXXQXXX | 936 | | | | |
| | Key | LGQQQQQFPG | 937 | | | | |
| | More preferably | QQQFPGQQQ | 938 | | | | |
| | Preferably | QQFPGQQQ | 939 | | | | |
| | Key | QQFPGQQ | 940 | | | | |
| P22 | Preferably | LXQQQQQXXXXQQXX | 941 | | | | |
| | Key | XXXQQXQXXXXQXXX | 942 | | | | |
| | More preferably | QQQQFPGQQQ | 943 | | | | |
| | Preferably | QQQQFPG | 944 | | | | |
| | Key | QQQQXXX | 945 | | | | |
| | Preferably | QQFPGQQQPF | 946 | | | | |
| | Key | QFPGQQQPF | 947 | | | | |
| P24 | Key | XXXQQXQXXXQQXXX | 948 | | | | |
| | Preferably | QFPGQQQPF | 949 | | | | |
| | Key | QFPGQQQ | 950 | | | | |
| P26 | Preferably | QQFPGQQ | 951 | | | | |
| | Key | QQFPG | 952 | | | | |
| P28 | More preferably | XXXXXQXFPGQQQXX | 953 | | | | |
| | Preferably | XXXXXQXXPGQXQXX | 954 | | | | |
| | Key | XXXXXQXXPGQXXXX | 955 | | | | |
| | Further preferably | QQFPGQQQ | 956 | | | | |
| | More preferably | QXFPGQQQ | 957 | | | | |
| | Preferably | QXXPGQXQ | 958 | | | | |
| | Key | QXXPGQXX | 959 | | | | |
| P32 | Key | LGQQQQ | 960 | | | | |
| | Preferably | QQQFPGQQ | 961 | | | | |
| | Key | FPGQQ | 962 | | | | |
| P33 | Key | XXQXQQQXXXXXXXX | 963 | | | | |
| | More preferably | QQQQFPGQQQ | 964 | | | | |
| | Preferably | QQQFPGQQQ | 965 | | | | |
| | Key | QQFPGQQ | 966 | | | | |
| P50 | Key | LGXQQQQFPGXXXXX | 967 | | | | |
| | More preferably | QQQQFPGQQQ | 968 | | | | |
| | Preferably | QQQFP | 969 | | | | |
| | Key | QQQFX | 970 | | | | |
| P54 | Preferably | XGQXQQQFXXXXXXX | 971 | | | | |
| | Key | XXQXQQQFXXXXXXX | 972 | | | | |
| | Key | QQQQ | 973 | | | | |

E13
Spot No. 2

| | | | | Food in which | | | |
|---|---|---|---|---|---|---|---|
| | | | SEQ ID | cross-reactivity | Graph | | SEQ ID |
| Protein name | LMW-m glutenin subunit 8 V9P767 | | NO | was confirmed | No. | Synthetic sequence | NO |
| 15-residue | QPFPQQQQPIILLQQ (positions 51-65 of SEQ | | 974 | | | | |
| sequences | ID NO: 4) | | | | | | |
| P7 | Key | QPFPQQQQP | 975 | | | | |
| | Key | IILLQ | 976 | | | | |
| P12 | Key | QPFPQQQ | 977 | | | | |
| | Key | FPQQQQPIII | 978 | | | | |
| | Key | IILLQ | 979 | | | | |
| P14 | Preferably | QPFPQQ | 980 | | | | |
| | Key | PFPQ | 981 | | | | |
| | Key | IILLQ | 982 | | | | |
| P15 | Key | XXXXXQXQPIILLXX | 983 | | | | |
| | Preferably | QPFPQQQQ | 984 | | | | |
| | Key | QPFPQQQ | 985 | | | | |
| | Preferably | IILLQ | 986 | | | | |
| | Key | IILLX | 987 | | | | |
| P21 | Key | QPFPQQ | 988 | | | | |
| | Key | IILLQ | 989 | | | | |
| P22 | Key | QXXXQQQXXXIXLXQ | 990 | | | | |
| P24 | Preferably | XXXXXQXXXIILLXX | 991 | | | | |
| | Key | XXXXXXXXXIILLXX | 992 | | | | |
| | More preferably | QQQQPIILLQ | 993 | | | | |
| | Preferably | XQXXXIILLX | 994 | | | | |
| | Key | XXXXXIILLX | 995 | | | | |
| P26 | Preferably | QPFPQQQ | 996 | | | | |
| | Key | PFPQQQ | 997 | | | | |
| | Key | IILLQ | 998 | | | | |
| P27 | Key | QQQQPITILQ | 999 | | | | |
| P28 | Key | QPFPQQQQPI | 1000 | | | | |
| | Preferably | PIILLQ | 1001 | | | | |
| | Key | IILLQ | 1002 | | | | |
| P32 | Key | QPFPQQ | 1003 | | | | |
| | Key | QQQQPITILQ | 1004 | | | | |
| P33 | Key | QPFPQQQ | 1005 | | | | |
| | Key | IILLQQSP | 1006 | | | | |
| P55 | More preferably | QXFPQQQQPILLLXX | 1007 | | | | |
| | Preferably | XXXPQQQQXIILLXX | 1008 | | | | |
| | Key | XXXXXQXXXIILLXX | 1009 | | | | |

E14
Spot No. 3

| | | | | Food in which | | | |
|---|---|---|---|---|---|---|---|
| | | | SEQ ID | cross-reactivity | Graph | | SEQ ID |
| Protein name | Gamma-gliadin P08453 | | NO | was confirmed | No. | Synthetic sequence | NO |
| 15-residue | WLQQQLVPQLQQPLS (positions 31-45 of | | 1010 | | | | |
| sequences | SEQ ID NO: 6) | | | | | | |
| P3 | More preferably | WXQQQLXPQLQXPXX | 1011 | | | | |
| | Preferably | XXXQQLXPQLQXXXX | 1012 | | | | |
| | Key | XXXQQLXPQLXXXXX | 1013 | | | | |
| | Further preferably | QLVPQLQQPL | 1014 | | | | |
| | More preferably | QLXPQLQXPX | 1015 | | | | |
| | Preferably | QLXPQLQXXX | 1016 | | | | |
| | Key | QLXPQLXXXX | 1017 | | | | |
| P4 | Preferably | WLQQQLVPQLQXPLS | 1018 | | | | |
| | Key | XLQQQLVPQLQXPXS | 1019 | | | | |
| | Preferably | QLVPQLQXPL | 1020 | | | | |
| | Key | QLVPQLQXPX | 1021 | | | | |
| P5 | More preferably | XXXXQXXPQLQXXXS | 1022 | | | | |
| | Preferably | XXXXQXXPQLQXXXX | 1023 | | | | |
| | Key | XXXXQXXPXLQXXXX | 1024 | | | | |
| | Further preferably | QLVPQLQQ | 1025 | | | | |
| | More preferably | QLVPQLQ | 1026 | | | | |
| | Preferably | LVPQLQ | 1027 | | | | |
| | Key | XXPQLQ | 1028 | | | | |
| P7 | More preferably | XXXXQXXPXLQXPLS | 1029 | | | | |
| | Preferably | XXXXQXXPXLXXPLX | 1030 | | | | |
| | Key | XXXXXXXPXLXXPLX | 1031 | | | | |
| | Preferably | QLVPQLQQ | 1032 | | | | |
| | Key | QXXPXLQX | 1033 | | | | |
| P8 | More preferably | XXXXQXVPQLQXPXS | 1034 | | | | |
| | Preferably | XXXXQXVPQLQXXXX | 1035 | | | | |
| | Key | XXXXQXXPXLQXXXX | 1036 | | | | |
| | More preferably | QLVPQLQ | 1037 | | | | |
| | Preferably | QXVPQLQ | 1038 | | | | |
| | Key | QXXPXLQ | 1039 | Wheat | 2 | QLVPQLQ | 2896 |
| | | | | Rye | | QPYPQLQ | 2897 |
| | | | | Barley | | QQPPFLQ | 2898 |
| | | | | Orchard grass | | QDMPYLQ | 2899 |
| P10 | Preferably | XXQQQXVXXLQQPLS | 1040 | | | | |
| | Key | XXXXXXVXXLQXXLS | 1041 | | | | |
| | Further preferably | LVPQLQQPL | 1042 | | | | |
| | More preferably | VPQLQQPL | 1043 | | | | |
| | Preferably | VXXLQQPL | 1044 | | | | |
| | Key | VXXLQXXL | 1045 | | | | |
| | Key | LQQPL | 1046 | | | | |
| P12 | Preferably | XXXQQXXXQLQQXLS | 1047 | | | | |
| | Key | XXXXXXXXQLQQXLS | 1048 | | | | |
| | More preferably | LVPQLQQPL | 1049 | | | | |
| | Preferably | LQQPL | 1050 | | | | |
| | Key | LQQXL | 1051 | | | | |
| P15 | More preferably | WLQXQXXXXLXXPLS | 1052 | | | | |
| | Preferably | WLXXQXXXXLXXPLS | 1053 | | | | |
| | Key | WLXXQXXXXXXXXLS | 1054 | | | | |
| | Preferably | LVPQLQQPL | 1055 | | | | |
| | Key | VPQLQQPL | 1056 | | | | |
| P17 | More preferably | XLXQQXVPXXXXPLS | 1057 | | | | |
| | Preferably | XLXXQXVPXXXXPXS | 1058 | | | | |
| | Key | XXXXQXVPXXXXPXS | 1059 | | | | |
| | More preferably | LQQQLVPQ | 1060 | | | | |
| | Preferably | LXQQXVPX | 1061 | | | | |
| | Key | LXXQXVPX | 1062 | | | | |
| | Key | LQQPL | 1063 | | | | |
| P21 | More preferably | QLVPQLQQ | 1064 | | | | |
| | Preferably | QLVPQLQ | 1065 | | | | |
| | Key | XXXPQLQ | 1066 | | | | |
| P24 | Key | XXXQQXVPQLQXPXS | 1067 | | | | |
| | Further preferably | QLVPQLQQ | 1068 | | | | |
| | More preferably | QLVPQLQ | 1069 | | | | |
| | Preferably | QXVPQLQ | 1070 | | | | |
| | Key | QXVPXLQ | 1071 | | | | |
| P31 | More preferably | XLXXQLVPXLQXPXS | 1072 | | | | |
| | Preferably | XLXXQXVPXLQXXXS | 1073 | | | | |
| | Key | XXXXQXVPXLQXXXX | 1074 | | | | |
| | Fulther preferably | QLVPQLQQPL | 1075 | | | | |
| | More preferably | LVPQLQQPL | 1076 | | | | |
| | Preferably | LVPXLQXPX | 1077 | | | | |
| | Key | XVPXLQXXX | 1078 | | | | |
| P33 | Key | LQQPL | 1079 | | | | |
| P35 | Fulther preferably | QLVPQLQ | 1080 | | | | |
| | More preferably | QXVPQLQ | 1081 | | | | |
| | Preferably | QXVPXLQ | 1082 | | | | |
| | Key | QXXPXLQ | 1083 | | | | |
| P36 | More preferably | WLXXQXXXXLQXPLS | 1084 | | | | |
| | Preferably | XLXXQXXXXLXXPLS | 1085 | | | | |
| | Key | XXXXXXXXXLXXPLS | 1086 | | | | |
| | Preferably | LQQPL | 1087 | | | | |
| | Key | LQXPL | 1088 | | | | |

E15
Spot No. 4

| | | | | Food in which | | | |
|---|---|---|---|---|---|---|---|
| | | | SEQ ID | cross-reactivity | Graph | | SEQ ID |
| Protein name | Fructose-bisphosphate aldolase W5CCA9 | | NO | was confirmed | No. | Synthetic sequence | NO |
| 15-residue | STKGGKPFVDILKAG (positions 73-87 of | | 1089 | | | | |
| sequences | SEQ ID NO: 8) | | | | | | |
| P2 | Preferably | STKGGKPF | 1090 | | | | |
| | Key | STKGGK | 1091 | | | | |
| P9 | Preferably | STKGGKXFVXXLKXX | 1092 | | | | |
| | Key | XXKGXKXFXXXXXXX | 1093 | | | | |
| P10 | Key | STKGXKXXXXXXXXX | 1094 | | | | |
| P12 | Preferably | XXKGGKPFVDILKAX | 1095 | | | | |
| | Key | XXXXGKXFVDXLKXX | 1096 | | | | |
| P14 | More preferably | XTKGXKPFXXXLKAX | 1097 | | | | |
| | Preferably | XTKGXKPFXXXLXXX | 1098 | | | | |
| | Key | XXKXXKPXXXXLXXX | 1099 | | | | |
| P16 | Key | STKGGKXXXDXLXXG | 1100 | | | | |
| | Key | KGGK | 1101 | | | | |
| | Key | KPFVDLLKA | 1102 | | | | |
| P17 | More preferably | XTKGGKXFVXXLKXX | 1103 | | | | |
| | Preferably | XXKGGKXFXXXXKXX | 1104 | | | | |
| | Key | XXKGGKXFXXXXKXX | 1105 | | | | |
| P18 | | | | | | | |
| P19 | Preferably | SXKGXXPFVDILKAG | 1106 | | | | |
| | Key | XXKXXXPFVDILKAG | 1107 | | | | |
| | Key | KGGK | 1108 | | | | |
| P21 | More preferably | STKGGXXXXXILKAG | 1109 | | | | |
| | Preferably | XTKGXXXXXXXLKAG | 1110 | | | | |
| | Key | XTKGXXXXXXXXKXX | 1111 | | | | |
| | Key | STKGGK | 1112 | | | | |
| | More preferably | KGGKPFVDLL | 1113 | | | | |
| | Preferably | KGGXXXXXIL | 1114 | | | | |
| | Key | KGGXXXXXXL | 1115 | | | | |
| P22 | More preferably | STKGXKPFVDIXKAG | 1116 | | | | |
| | Preferably | STKGXKPFVDIXKAX | 1117 | | | | |
| | Key | STKGXKPFVDXXKAX | 1118 | | | | |
| | Preferably | TKGGK | 1119 | | | | |
| | Key | TKGXK | 1120 | | | | |
| | Further preferably | GGKPFVDILK | 1121 | | | | |
| | More preferably | GKPFVDLLK | 1122 | | | | |
| | Preferably | XKPFVDIXK | 1123 | | | | |
| | Key | XKPFVDXXK | 1124 | | | | |
| P24 | Key | STKXXXXFXXXXXXX | 1125 | | | | |
| | Preferably | TKGGK | 1126 | | | | |
| P26 | Key | XTKGGKPFVDILKXX | 1127 | | | | |
| P32 | More preferably | XXKGGKPFVXILKAX | 1128 | | | | |
| | Preferably | XXKXXKXFXXXLKAX | 1129 | | | | |
| | Key | XXXXXKXFXXXLKAX | 1130 | | | | |
| | Preferably | KPFVDI | 1131 | | | | |
| | Key | KPFVXI | 1132 | | | | |
| P33 | Key | XXKGXKXFVDXLXXG | 1133 | | | | |
| P34 | Key | STKGGKP | 1134 | | | | |
| | Key | KGGKPFVDLL | 1135 | | | | |
| | Key | GKPFVDLLKA | 1136 | | | | |
| P35 | | | | | | | |
| G1 | Key | XXXXGXXFXDXLXXX | 1137 | | | | |
| G3 | Preferably | STKGGXXXVDXLXXX | 1138 | | | | |
| | Key | XXKGGXXXVDXXXXX | 1139 | | | | |
| | Key | KGGK | 1140 | | | | |
| G7 | Key | GGKPFVD | 1141 | | | | |

E16
Spot No. 4

| | | | | Food in which | | | |
|---|---|---|---|---|---|---|---|
| | | | SEQ ID | cross-reactivity | Graph | | SEQ ID |
| Protein name | Fructose-bisphosphate aldolase W5CCA9 | | NO | was confirmed | No. | Synthetic sequence | NO |
| 15-residue | TEPSQLSLDQNAQGL (positions 143-157 of | | 1142 | | | | |
| sequences | SEQ ID NO: 8) | | | | | | |
| P21 | Preferably | XXXXQLXLDQNXXXX | 1143 | | | | |
| | Key | XXXXQXXXDQNXXXX | 1144 | Wheat/rye/barley/ | 2 | TEPSQLSIDQNAQGL | 1142 |
| | | | | timothy | | NEPSQLSLDQNAQGL | 2900 |
| | More preferably | QLSIDQN | 1145 | | | | |
| | Preferably | QLXLDQN | 1146 | | | | |
| | Key | QXXXDQN | 1147 | | | | |
| P33 | Key | TEXXXLSIDQNXXXX | 1148 | | | | |
| | Key | PSQL | 1149 | | | | |
| P35 | Key | TEPSQLSIDQ | 1150 | | | | |
| | Key | SQLSIDQNA | 1151 | | | | |
| | Key | LSIDQNAQGL | 1152 | | | | |
| G1 | Key | TEPSQLSIDQNXXXX | 1153 | | | | |
| | Key | QGLAR | 1154 | | | | |
| G5 | Key | TEPXQXSLDQXXXXX | 1155 | | | | |
| | More preferably | TEPSQLSIDQ | 1156 | | | | |
| | Preferably | TEPSQL | 1157 | | | | |
| | Key | TEPXQX | 1158 | | | | |
| G7 | More preferably | TEPSQLSIDXNAXGL | 1159 | | | | |
| | Preferably | TEPSQLSXDXNAXGL | 1160 | | | | |
| | Key | TXPXQLSXDXNAXXL | 1161 | | | | |
| | Further preferably | SIDQNAQG | 1162 | | | | |
| | More preferably | SLDXNAXG | 1163 | | | | |
| | Preferably | SXDXNAXG | 1164 | | | | |
| | Key | SXDXNAXX | 1165 | | | | |

E17
Spot No. 5

| | | | | Food in which | | | |
|---|---|---|---|---|---|---|---|
| | | | SEQ ID | cross-reactivity | Graph | | SEQ ID |
| Protein name | Alpha-gliadin Gli2-LM2-12 Q1WA40 | | NO | was confirmed | No. | Synthetic sequence | NO |
| 15-residue | PGQQQQFPPQQPYPQ (positions 51-65 of | | 1166 | | | | |
| sequences | SEQ ID NO: 10) | | | | | | |
| P3 | Key | PXQQQXXXXXXXXXQ | 1167 | | | | |
| | Preferably | PGQQQQFPPQ | 1168 | | | | |
| | Key | PXQQQXXXXX | 1169 | | | | |
| | Key | FPPQQP | 1170 | | | | |
| P7 | Preferably | PXQXQXXXXQQXYPX | 1171 | | | | |
| | Key | PXXXQXXXXXQXYXX | 1172 | | | | |
| | Preferably | QQQQFPPQQP | 1173 | | | | |
| | Key | QXQXXXXQQX | 1174 | | | | |
| P8 | More preferably | QQQFPPQQP | 1175 | | | | |
| | Preferably | QQFPPQQ | 1176 | | | | |
| | Key | QQFPPQ | 1177 | | | | |
| P9 | Key | XXQQQXXPXXXXXXX | 1178 | | | | |
| P12 | Preferably | QQFPPQQ | 1179 | | | | |
| | Key | QQFPP | 1180 | | | | |
| P14 | Preferably | PGQQQXXXXQQXXXX | 1181 | | | | |
| | Key | XXQQQXXXXXQXXXX | 1182 | | | | |
| | Key | QQFPPQQ | 1183 | | | | |
| P19 | Key | XXXQQXXXXXQPXXX | 1184 | | | | |
| | Key | QQFPPQQP | 1185 | | | | |
| P21 | Key | PXXQQQXXXXQXXXX | 1186 | | | | |
| | More preferably | QQQQFPPQQ | 1187 | | | | |
| | Preferably | QQFPPQQ | 1188 | | | | |
| | Key | QQFPPQ | 1189 | | | | |
| | Key | QQFPPQQPYP | 1190 | | | | |
| P22 | More preferably | PGXQQXXXXQXPYXX | 1191 | | | | |
| | Preferably | PGXQQXXXXQXXYXX | 1192 | | | | |
| | Key | PGXQQXXXXXXXYXX | 1193 | | | | |
| | Key | QQQQFPPQ | 1194 | | | | |
| | Key | QFPPQQPYPQ | 1195 | | | | |
| P26 | Preferably | PGQQQXXXXXXXXXX | 1196 | | | | |
| | Key | PXQQQXXXXXXXXXX | 1197 | | | | |
| P28 | Preferably | PGQQQQXPPQQPYPQ | 1198 | | | | |
| | Key | PGQQQQXXPQQPYPQ | 1199 | | | | |
| | Key | QQFPGQQQQ | 1200 | | | | |
| P31 | Preferably | PGQQQQXXXQXXXXX | 1201 | | | | |
| | Key | PGQXQXXXXXXXXXX | 1202 | | | | |
| P34 | Preferably | PGXXQXXPPXXXXXQ | 1203 | | | | |
| | Key | XGXXQXXPPXXXXXQ | 1204 | | | | |
| | More preferably | QQQQFPPQQP | 1205 | | | | |
| | Preferably | QQFPPQQP | 1206 | | | | |
| | Key | FPPQQ | 1207 | | | | |
| P35 | Key | QQFPPQQ | 1208 | | | | |

E18
Spot No. 9

| | | | | Food in which | | | |
|---|---|---|---|---|---|---|---|
| | | | SEQ ID | cross-reactivity | Graph | | SEQ ID |
| Protein name | LMW-D8(LMW-GS) B2BZD1 | | NO | was confirmed | No. | Synthetic sequence | NO |
| 15-residue | PIQQQPQPFPQQPPC (positions 51-65 of | | 1209 | | | | |
| sequences | SEQ ID NO: 18) | | | | | | |
| P2 | Preferably | PIQQQP | 1210 | | | | |
| | Key | PIQQXX | 1211 | | | | |
| P7 | Key | XXXXXPQXFPQQXPX | 1212 | | | | |
| | Preferably | PIQQQPQPFP | 1213 | | | | |
| | Key | XXXXXPQXFP | 1214 | | | | |
| | More preferably | PQQPPC | 1215 | | | | |
| | Preferably | PQQPP | 1216 | | | | |
| | Key | PQQXP | 1217 | | | | |
| P9 | Preferably | PIQQQP | 1218 | | | | |
| | Key | PIQQXX | 1219 | | | | |
| | Key | IQQQP | 1220 | | | | |
| P10 | Preferably | PIQQQPQPF | 1221 | | | | |
| | Key | PIQQXXXXX | 1222 | | | | |
| | Key | IQQQP | 1223 | | | | |
| P12 | More preferably | PIQQQPQPFP | 1224 | | | | |
| | Preferably | QQPIQQQP | 1225 | | | | |
| | Key | PIQQQP | 1226 | | | | |
| | Key | PQQPPC | 1227 | | | | |
| P13 | More preferably | PIQQQPQPFP | 1228 | | | | |
| | Preferably | PIQQQP | 1229 | | | | |
| | Key | PIQQXX | 1230 | | | | |
| | Key | PQQPP | 1231 | | | | |
| P14 | Preferably | XIQXXXXXXPQQXXX | 1232 | | | | |
| | Key | XIXXXXXXXPQQXXX | 1233 | | | | |
| | Key | PQQPP | 1234 | | | | |
| P17 | Key | PQQPP | 1235 | | | | |
| P21 | Key | PQQPP | 1236 | | | | |
| P24 | Preferably | PXQQQPQPFPQQPPC | 1237 | | | | |
| | Key | PXQQQPQPFPQXPPC | 1238 | | | | |
| | Preferably | QQQPIQQQP | 1239 | | | | |
| | Key | QQQPXQQQP | 1240 | | | | |
| P26 | Key | PIQQQP | 1241 | | | | |
| | Preferably | PQQPPC | 1242 | | | | |
| | Key | PQQPP | 1243 | | | | |
| P31 | Key | PIQQQP | 1244 | | | | |
| | Preferably | PQQPPC | 1245 | | | | |
| | Key | PQQPP | 1246 | | | | |
| P32 | Key | PIQQQP | 1247 | | | | |
| | Key | PQQPP | 1248 | | | | |
| P33 | Key | QQPIQQQP | 1249 | | | | |
| | Key | PQQPP | 1250 | | | | |
| P35 | Key | XXXXXXQPFPXXXXX | 1251 | | | | |
| | Key | PQQPP | 1252 | | | | |
| P36 | Preferably | PIQQQPQPFP | 1253 | | | | |
| | Key | PIQQQP | 1254 | | | | |
| | Preferably | PQQPPC | 1255 | | | | |
| | Key | PQQPP | 1256 | | | | |

E19
Spot No. 7

| | | | | Food in which | | | |
|---|---|---|---|---|---|---|---|
| | | | SEQ ID | cross-reactivity | Graph | | SEQ ID |
| Protein name | Gamma gliadin-A1 M9TG60 | | NO | was confirmed | No. | Synthetic sequence | NO |
| 15-residue | SSLVSMLLPRSDCKV (positions 211-225 of | | 1257 | | | | |
| sequences | SEQ ID NO: 14) | | | | | | |
| P2 | Key | XXXXXXIXPXSDCKV | 1258 | | | | |
| | Key | LPRS | 1259 | | | | |
| P8 | Preferably | XXXVSMILPRSDCKV | 1260 | | | | |
| | Key | XXXXSMILPRSDXKV | 1261 | | | | |
| P9 | Preferably | XXXVSMILXRSDCKV | 1262 | | | | |
| | Key | XXXVSXLLXXXXXKV | 1263 | | | | |
| P16 | More preferably | XXLVSMILPRSDCKV | 1264 | | | | |
| | Preferably | XXXXXMILPRSDCKV | 1265 | | | | |
| | Key | XXXXXXIXPRSDXKV | 1266 | | | | |
| P20 | Preferably | XXLVSMILPRSDCKV | 1267 | | | | |
| | Key | XXXXSMILPRSDCKV | 1268 | | | | |
| | Key | LPRS | 1269 | | | | |
| P21 | Preferably | XXXVSMILPRSDCKV | 1270 | | | | |
| | Key | XXXXSXLLPRSXCKV | 1271 | | | | |
| P26 | More preferably | XXLVSMILPRSDCKV | 1272 | | | | |
| | Preferably | XXXVSMILPRSDCKV | 1273 | | | | |
| | Key | XXXXSMILPRSDCKV | 1274 | | | | |
| P29 | Preferably | XXXVSMILPRSDCKV | 1275 | | | | |
| | Key | XXXXSMILXRXDCKV | 1276 | | | | |
| | Key | LPRS | 1277 | | | | |
| P30 | Preferably | XXXVSMILPRSDCKV | 1278 | | | | |
| | Key | XXXXSMILPRSDCKV | 1279 | | | | |
| P33 | Preferably | XXXVSMILPRSDCKV | 1280 | | | | |
| | Key | XXXXSMILXRSDCKV | 1281 | | | | |
| | Key | LPRS | 1282 | | | | |
| P34 | Preferably | XXLVSXLLXXSDCKV | 1283 | | | | |
| | Key | XXXVSXIXXXSDCKV | 1284 | | | | |
| P50 | Preferably | XXLXXMLLXXSDXXX | 1285 | | | | |
| | Key | XXLXXMLLXXXDXXX | 1286 | | | | |
| | Key | LLPRS | 1287 | | | | |
| P52 | Key | LPRS | 1288 | | | | |
| P53 | Preferably | XXXVXXILXRXDXKV | 1289 | | | | |
| | Key | XXXXXXILXRXDXXX | 1290 | | | | |
| | Key | LPRS | 1291 | | | | |
| G6 | More preferably | XXLVSMILXXSDCKV | 1292 | | | | |
| | Preferably | XXXVSMILXXSDCKV | 1293 | | | | |
| | Key | XXXVSXLLXXXXXXX | 1294 | | | | |
| G7 | Key | VSMLLPRSD | 1295 | | | | |
| | Key | LLPRSDCKV | 1296 | | | | |

E20
Spot No. 4

| | | | | Food in which | | | |
|---|---|---|---|---|---|---|---|
| | | | SEQ ID | cross-reactivity | Graph | | SEQ ID |
| Protein name | Fructose-b sphosphate aldolase W5CCA9 | | NO | was confirmed | No. | Synthetic sequence | NO |
| 15-residue | SINVENVEDNRRALR (positions 33-47 of | | 1297 | | | | |
| sequences | SEQ ID NO: 8) | | | | | | |
| P2 | Preferably | SLNVENVEXNRRAXR | 1298 | | | | |
| | Key | SLNVENVEXNRRAXX | 1299 | | | | |
| | Preferably | SLNVENVED | 1300 | | | | |
| | Key | SLNVEN | 1301 | | | | |
| P3 | Key | XXXXENXEDXRXXXX | 1302 | | | | |
| | Preferably | INVEN | 1303 | | | | |
| | Key | NVEN | 1304 | | | | |
| | Key | NRRALR | 1305 | | | | |
| P8 | Key | SXNVXXXEDNRRXXX | 1306 | | | | |
| | Key | NVEN | 1307 | | | | |
| P9 | Key | SLNXEXXEXNRXXXX | 1308 | | | | |
| P10 | Preferably | XXNVENXEDNRXXXX | 1309 | | | | |
| | Key | XXXXXXXEDNRXXXX | 1310 | | | | |
| | Key | NVEN | 1311 | | | | |
| P12 | Key | SLNXXXXXXNRXXXX | 1312 | | | | |
| | Key | NVEN | 1313 | | | | |
| P14 | Preferably | SLNVEXXXDXRXXXX | 1314 | | | | |
| | Key | SLNVEXXXXXRXXXX | 1315 | | | | |
| | Key | VEDNRRALR | 1316 | | | | |
| P15 | Key | XXNVXNXEXNRXXXX | 1317 | | | | |
| P17 | Preferably | XINVENVEDNRXXXX | 1318 | | | | |
| | Key | XXXVENVXDNXXXXX | 1319 | | | | |
| | Key | NVEN | 1320 | | | | |
| P20 | More preferably | SXNVENVEDNRRAXX | 1321 | | | | |
| | Preferably | XXXXENVEDNRRXXX | 1322 | | | | |
| | Key | XXXXXNXEDNRRXXX | 1323 | | | | |
| | Preferably | INVEN | 1324 | | | | |
| | Key | XNVEN | 1325 | | | | |
| | More preferably | EDNRRALR | 1326 | | | | |
| | Preferably | EDNRRAXX | 1327 | | | | |
| | Key | EDNRRXXX | 1328 | | | | |
| P22 | More preferably | XIXVEXXEDNRXALX | 1329 | | | | |
| | Preferably | XIXVEXXEDNRXXXX | 1330 | | | | |
| | Key | XIXVEXXXDNRXXXX | 1331 | | | | |
| | Preferably | SLNVEN | 1332 | | | | |
| | Key | INVEN | 1333 | | | | |
| P26 | Preferably | SLNVENVEDNRRXXX | 1334 | | | | |
| | Key | SLNVENVEDNRXXXX | 1335 | | | | |
| | Key | NVEN | 1336 | | | | |
| P32 | Preferably | XIXXXNVEDNRRXXX | 1337 | | | | |
| | Key | XIXXXXVEDNRRXXX | 1338 | | | | |
| | Preferably | INVEN | 1339 | | | | |
| | Key | NVEN | 1340 | | | | |
| | Key | NRRALR | 1341 | | | | |
| P33 | Preferably | SLNVENVEDNRXXXX | 1342 | | | | |
| | Key | XINVENVEDNRXXXX | 1343 | | | | |
| | Preferably | INVEN | 1344 | | | | |
| | Key | NVEN | 1345 | | | | |
| | Key | NRRALR | 1346 | | | | |
| P34 | More preferably | XIXVENVEDNRRALX | 1347 | | | | |
| | Preferably | XIXVENVEDNRRAXX | 1348 | | | | |
| | Key | XXXXEXVEXNRRXXX | 1349 | | | | |
| | More preferably | SLNVEN | 1350 | | | | |
| | Preferably | INVEN | 1351 | | | | |
| | Key | IXVEN | 1352 | | | | |
| P35 | Key | NVEN | 1353 | | | | |
| | Key | VEDNRRALR | 1354 | | | | |
| P36 | Key | XXXVXNVXDNRRXXX | 1355 | | | | |
| | Preferably | INVEN | 1356 | | | | |
| | Key | NVEN | 1357 | | | | |
| | Preferably | VEDNRRALR | 1358 | | | | |
| | Key | VXDNRRXXX | 1359 | | | | |
| P51 | Preferably | INVEN | 1360 | | | | |
| | Key | NVEN | 1361 | | | | |
| G7 | More preferably | SLNVENVEDNRRAXX | 1362 | | | | |
| | Preferably | XXNVXNVEDNRRXXX | 1363 | | | | |
| | Key | XXNXXNVEDNRRXXX | 1364 | | | | |
| | Preferably | SLNVEN | 1365 | | | | |
| | Key | INVEN | 1366 | | | | |

E21
Spot No. 2

| | | | | Food in which | | | |
|---|---|---|---|---|---|---|---|
| | | | SEQ ID | cross-reactivity | Graph | | SEQ ID |
| Protein name | LMW-m glutenin subunit 8 V9P767 | | NO | was confirmed | No. | Synthetic sequence | NO |
| 15-residue | KPWQQQPLPPQQQPP (positions 31-45 of | | 1367 | | | | |
| sequences | SEQ ID NO: 4) | | | | | | |
| P2 | Key | KPWQQQ | 1368 | | | | |
| | Preferably | QQPLPPQQ | 1369 | | | | |
| | Key | QPLPPQQ | 1370 | | | | |
| P4 | Preferably | QPLPPQQQP | 1371 | | | | |
| | Key | QPLPPQQQ | 1372 | | | | |
| P7 | More preferably | KPWQQQPLP | 1373 | | | | |
| | Preferably | PWQQQPLP | 1374 | | | | |
| | Key | PWQQQPL | 1375 | | | | |
| P9 | Preferably | KPWQQQPLXXXQXXP | 1376 | | | | |
| | Key | XPWQQXXXXXXXXXX | 1377 | | | | |
| | Preferably | QQPLPPQQQP | 1378 | | | | |
| | Key | QQPLXXXQXX | 1379 | | | | |
| P10 | Key | PWQQQPLPPQ | 1380 | | | | |
| P12 | Preferably | PWQQQPLPPQ | 1381 | | | | |
| | Key | PWQQQPLPP | 1382 | | | | |
| | Key | PPQQQ | 1383 | | | | |
| P14 | Key | KXWXQQPLXXXXXXX | 1384 | | | | |
| | Preferably | KPWQQQPLP | 1385 | | | | |
| | Key | KXWXQQPLX | 1386 | | | | |
| | More preferably | QQQPLPPQQQ | 1387 | | | | |
| | Preferably | QQPLPPQQQ | 1388 | | | | |
| | Key | QQPLXXXXX | 1389 | | | | |
| P15 | Key | PWQQQ | 1390 | | | | |
| | Key | QPLPPQQQ | 1391 | | | | |
| P21 | More preferably | KPWQQQPLPP | 1392 | | | | |
| | Preferably | QPLPPQQQ | 1393 | | | | |
| | Key | QPLP | 1394 | | | | |
| P24 | More preferably | KPWQQXXLXXQQQPP | 1395 | | | | |
| | Preferably | KPWQQXXXXXXXQPX | 1396 | | | | |
| | Key | XPWQQXXXXXXXXXX | 1397 | | | | |
| | More preferably | KPWQQQPLPP | 1398 | | | | |
| | Preferably | KPWQQXXLXX | 1399 | | | | |
| | Key | KPWQQXXXXX | 1400 | | | | |
| P35 | Preferably | KPWQQQ | 1401 | | | | |
| | Key | KPWQQX | 1402 | | | | |

E22
Spot No. 5

| | | | | Food in which | | | |
|---|---|---|---|---|---|---|---|
| | | | SEQ ID | cross-reactivity | Graph | | SEQ ID |
| Protein name | Alpha-gliadin Gli2-LM2-12 Q1WA40 | | NO | was confirmed | No. | Synthetic sequence | NO |
| 15-residue | QYLQPQQPISQQQAQ (positions 111-125 of | | 1403 | | | | |
| sequences | SEQ ID NO: 10) | | | | | | |
| P2 | Key | XYXXXXXXIXQXXXQ | 1404 | | | | |
| | Key | YLQPQQPISQ | 1405 | | | | |
| P3 | Key | XYXXPQQXIXXQQXX | 1406 | | | | |
| | Preferably | YLQPQQPISQ | 1407 | | | | |
| | Key | YXXPQQXIXX | 1408 | | | | |
| | Preferably | QPQQPISQQQ | 1409 | | | | |
| | Key | XPQQXIXXQQ | 1410 | | | | |
| | Preferably | QQPISQQQAQ | 1411 | | | | |
| | Key | QQXIXXQQXX | 1412 | | | | |
| P4 | Key | XXXXXXQXIXQXQXQ | 1413 | | | | |
| | Preferably | YLQPQQPISQ | 1414 | | | | |
| | Key | YLQPQQPIS | 1415 | | | | |
| P8 | Key | YLQPQQPIS | 1416 | | | | |
| | Key | QQPISQQQAQ | 1417 | | | | |
| P9 | Preferably | YLQPQQPISQ | 1418 | | | | |
| | Key | YLQPQQPIS | 1419 | | | | |
| | Key | SQQQA | 1420 | | | | |
| P10 | More preferably | YLQPQQPIS | 1421 | | | | |
| | Preferably | YLQPQQ | 1422 | | | | |
| | Key | YLQPQ | 1423 | | | | |
| | Key | SQQQA | 1424 | | | | |
| P12 | Preferably | YLQPQQPIS | 1425 | | | | |
| | Key | YLQPQ | 1426 | | | | |
| P14 | More preferably | YLQPQQPISQ | 1427 | | | | |
| | Preferably | YLQPQQPIS | 1428 | | | | |
| | Key | YLQPQQ | 1429 | | | | |
| P15 | Preferably | YLQPQQPIS | 1430 | | | | |
| | Key | YLQPQQP | 1431 | | | | |
| | Key | SQQQAQ | 1432 | | | | |
| P16 | Key | XYXXPXQPIXXXQXQ | 1433 | | | | |
| | Preferably | YLQPQQPI | 1434 | | | | |
| | Key | YXXPXQPI | 1435 | | | | |
| | Key | LQPQQP | 1436 | | | | |
| | Preferably | PQQPISQQQA | 1437 | | | | |
| | Key | PXQPIXXXQX | 1438 | | | | |
| | Key | SQQQA | 1439 | | | | |
| P18 | Key | XYXXXXQXXXQXQXQ | 1440 | | | | |
| | Preferably | YLQPQQPISQ | 1441 | | | | |
| | Key | YLQPQQPIS | 1442 | | | | |
| | Key | SQQQA | 1443 | | | | |
| P21 | Preferably | YLQPQQPIS | 1444 | | | | |
| | Key | YLQPQ | 1445 | | | | |
| | Preferably | PQQPISQQQ | 1446 | | | | |
| | Key | QQPISQQQ | 1447 | | | | |
| P22 | Preferably | XYLXPXQXIXQQQXQ | 1448 | | | | |
| | Key | XYLXPXQXIXXQQXQ | 1449 | | | | |
| | Further preferably | YLQPQQPISQ | 1450 | | | | |
| | More preferably | LQPQQPISQ | 1451 | | | | |
| | Preferably | LXPXQXIXQ | 1452 | | | | |
| | Key | LXPXQXIXX | 1453 | | | | |
| | More preferably | QQPISQQQAQ | 1454 | | | | |
| | Preferably | XQXIXQQQXQ | 1455 | | | | |
| | Key | XQXIXXQQXQ | 1456 | | | | |
| P24 | Preferably | XYLXPQQXISQXQXQ | 1457 | | | | |
| | Key | XXLXPXQXISXXQXQ | 1458 | | | | |
| | Further preferably | YLQPQQPISQ | 1459 | | | | |
| | More preferably | LQPQQPISQ | 1460 | | | | |
| | Preferably | LXPQQXISQ | 1461 | | | | |
| | Key | LXPXQXISX | 1462 | | | | |
| | Further preferably | QQPISQQQAQ | 1463 | | | | |
| | More preferably | QQPISQQQA | 1464 | | | | |
| | Preferably | QQXISQXQX | 1465 | | | | |
| | Key | XQXISXXQX | 1466 | | | | |
| P26 | Preferably | YLQPQQPIS | 1467 | | | | |
| | Key | YLQPQQP | 1468 | | | | |
| P27 | More preferably | XYXXPXQXISQXQXQ | 1469 | | | | |
| | Preferably | XXXXXXQXIXQXQXQ | 1470 | | | | |
| | Key | XXXXXXXXIXQXQXQ | 1471 | | | | |
| | Preferably | YLQPQQPIS | 1472 | | | | |
| | Key | YXXPXQXIS | 1473 | | | | |
| | Preferably | LQPQQPIS | 1474 | | | | |
| | Key | XXPXQXIS | 1475 | | | | |
| P32 | Key | XYXXXQXXIXXQQXX | 1476 | | | | |
| | Preferably | YLQPQQPISQ | 1477 | | | | |
| | Key | YLQPQQPIS | 1478 | | | | |
| P33 | Preferably | YLQPQQPISQ | 1479 | | | | |
| | Key | YLQPQQPIS | 1480 | | | | |
| P34 | Key | XYXXPXQXIXXXXXQ | 1481 | | | | |
| | More preferably | YLQPQQPISQ | 1482 | | | | |
| | Preferably | YLQPQQPIS | 1483 | | | | |
| | Key | YLQPQQP | 1484 | | | | |
| | Key | SQQQA | 1485 | | | | |
| P35 | Key | XYXXXXQXIXQQQXQ | 1486 | | | | |
| | Preferably | YLQPQQPISQ | 1487 | | | | |
| | Key | YLQPQQPIS | 1488 | | | | |
| | Preferably | QQPISQQQAQ | 1489 | | | | |
| | Key | XQXIXQQQXQ | 1490 | | | | |
| P36 | Key | XYXXXXQXXSXQQXQ | 1491 | | | | |
| | Preferably | YLQPQQPISQ | 1492 | | | | |
| | Key | YLQPQQPIS | 1493 | | | | |
| G6 | Preferably | YLQPQQPISQ | 1494 | | | | |
| | Key | YLQPQQPI | 1495 | | | | |
| G7 | More preferably | XXXXPQQXIXXXQAQ | 1496 | | | | |
| | Preferably | XXXXPXQXIXXXQAQ | 1497 | | | | |
| | Key | XXXXXXQXIXXXXAQ | 1498 | | | | |
| | More preferably | YLQPQQPISQ | 1499 | | | | |
| | Preferably | YLQPQQPIS | 1500 | | | | |
| | Key | XXXPQQXIX | 1501 | | | | |
| | Key | LQPQQP | 1502 | | | | |
| | Preferably | QPISQQQA | 1503 | | | | |
| | Key | QXIXXXQA | 1504 | | | | |
| | Key | SQQQA | 1505 | | | | |
| G9 | Preferably | YLQPQQP | 1506 | | | | |
| | Key | YLQPQ | 1507 | | | | |

E23
Spot No. 8, 14

| | | | | Food in which | | | |
|---|---|---|---|---|---|---|---|
| | | | SEQ ID | cross-reactivity | Graph | | SEQ ID |
| Protein name | Alpha-gliadin (Fragment) A0A0E3UR64 | | NO | was confirmed | No. | Synthetic sequence | NO |
| 15-residue | QVPLVQQQQFLGQQQ (positions 41-55 | | 1508 | | | | |
| sequences | of SEQ ID NOs: 15 and 28) | | | | | | |
| P3 | Preferably | QVPLVQQ | 1509 | | | | |
| | Key | QXXLVQQ | 1510 | | | | |
| P4 | More preferably | QVPLVQQQQFLGQXQ | 1511 | | | | |
| | Preferably | QVPLVQQQQFXGQXX | 1512 | | | | |
| | Key | XVPLVQQQQXXXQXX | 1513 | | | | |
| | Preferably | QVPLVQQQQ | 1514 | | | | |
| | Key | XVPLVQQQQ | 1515 | | | | |
| P7 | Preferably | QXXXVQQXXXXXXQQ | 1516 | | | | |
| | Key | QXXXVQQXXXXXXQX | 1517 | | | | |
| | Preferably | QVPLVQQ | 1518 | | | | |
| | Key | QXXXVQQ | 1519 | | | | |
| P8 | Preferably | QVPLVQQ | 1520 | | | | |
| | Key | QXXLVQQ | 1521 | Wheat/rye/barley | 3 | QVPLVQQ | 2901 |
| P10 | Key | XXXXVQQXXXXXXQQ | 1522 | | | | |
| | Further preferably | QVPLVQQQQF | 1523 | | | | |
| | More preferably | QVPLVQQQQ | 1524 | | | | |
| | Preferably | LVQQQQFLG | 1525 | | | | |
| | Key | VQQQ | 1526 | | | | |
| P12 | More preferably | QVPLVQQQQ | 1527 | | | | |
| | Preferably | QVPLVQQ | 1528 | | | | |
| | Key | QXXLVQQ | 1529 | | | | |
| P14 | Preferably | XXXXVQQQQFXGQQQ | 1530 | | | | |
| | Key | XXXXVQQQXXXXQQQ | 1531 | | | | |
| | Preferably | QVPLVQQQ | 1532 | | | | |
| | Key | XXXXVQQQ | 1533 | | | | |
| | Preferably | QQQQFLG | 1534 | | | | |
| | Key | QQQQFXG | 1535 | | | | |
| P17 | Preferably | QXXLVQQXXXXGQXX | 1536 | | | | |
| | Key | XXXXVQQXXXXGQXX | 1537 | | | | |
| | Further preferably | LVQQQQFLGQ | 1538 | | | | |
| | More preferably | LVQQQQFLG | 1539 | | | | |
| | Preferably | VQQQQFLG | 1540 | | | | |
| | Key | VQQXXXXG | 1541 | | | | |
| P21 | More preferably | QVPLVQQQQ | 1542 | | | | |
| | Preferably | QVPLVQQ | 1543 | | | | |
| | Key | QXXXVQQ | 1544 | | | | |
| P34 | Preferably | XXPLVXQQQXLGQQQ | 1545 | | | | |
| | Key | XXXXXXQQQXLGQQX | 1546 | | | | |
| | More preferably | QVPLVQQQQ | 1547 | | | | |
| | Preferably | QVPLVQQQ | 1548 | | | | |
| | Key | XXPLVXQQ | 1549 | | | | |
| | More preferably | LVQQQQFLGQ | 1550 | | | | |
| | Preferably | QQQQFLGQ | 1551 | | | | |
| | Key | XQQQXLGQ | 1552 | | | | |
| P35 | Preferably | QXPLVQQXQFLGQQQ | 1553 | | | | |
| | Key | XXXLVQQXXXXGQQQ | 1554 | | | | |
| | Preferably | QVPLVQQQ | 1555 | | | | |
| | Key | LVQQQ | 1556 | | | | |
| P50 | More preferably | QVPLVQQQQF | 1557 | | | | |
| | Preferably | PLVQQQQF | 1558 | | | | |
| | Key | XPXVXXQXF | 1559 | | | | |
| | Key | QQQFLGQQ | 1560 | | | | |
| G7 | Key | XVPLVQQQQFLGQQQ | 1561 | | | | |
| | More preferably | QVPLVQQQQF | 1562 | | | | |
| | Preferably | QVPLVQQQQ | 1563 | | | | |
| | Key | XVPLVQQQQ | 1564 | | | | |
| | Key | QQQQFLGQ | 1565 | | | | |

E24
Spot No. 3

| | | | | Food in which | | | |
|---|---|---|---|---|---|---|---|
| | | | SEQ ID | cross-reactivity | Graph | | SEQ ID |
| Protein name | Gamma-gliadin P08453 | | NO | was confirmed | No. | Synthetic sequence | NO |
| 15-residue | PQQPQQPFPQTQQPQ (positions 85-99, 103- | | 1566 | | | | |
| sequences | 107 and 121-135 of SEQ ID NO: 6) | | | | | | |
| P3 | More preferably | | | | | | |
| | Preferably | PFPQTQQ | 1567 | | | | |
| | Key | PFPQTQ | 1568 | | | | |
| P12 | Key | XXXXXXXXXQTQQXX | 1569 | | | | |
| P16 | More preferably | PQQXQQPFPQTQQXQ | 1570 | | | | |
| | Preferably | PQQXQQPFPQTQXXX | 1571 | | | | |
| | Key | PQQXQQPFPQTXXXX | 1572 | | | | |
| | Preferably | PQQPQQPFP | 1573 | | | | |
| | Key | PQQXQQPFP | 1574 | | | | |
| | Preferably | QQPQQ | 1575 | | | | |
| | Key | QQXQQ | 1576 | | | | |
| | More preferably | PFPQTQQ | 1577 | | | | |
| | Preferably | PFPQTQX | 1578 | | | | |
| | Key | PFPQTXX | 1579 | | | | |
| P20 | Further preferably | QPFPQTQQPQ | 1580 | | | | |
| | More preferably | PFPQTQQPQ | 1581 | | | | |
| | Preferably | FPQTQQPQ | 1582 | | | | |
| | Key | XXXTQQXQ | 1583 | | | | |
| P21 | Preferably | XXXXXXXXXQTQQPQ | 1584 | | | | |
| | Key | XXXXXXXXXQTQQXQ | 1585 | | | | |
| | More preferably | QQPFPQTQQP | 1586 | | | | |
| | Preferably | XXXXXQTQQP | 1587 | | | | |
| | Key | XXXXXQTQQX | 1588 | | | | |
| P50 | Key | XXXXXQPFXXXXXXQ | 1589 | | | | |
| | Preferably | QPFPQTQQPQ | 1590 | | | | |
| | Key | QPFPQTQQP | 1591 | | | | |
| P52 | Key | XXQPXQPFPQTQQPQ | 1592 | | | | |
| | Most preferably | QPQQPFPQ | 1593 | | | | |
| | Further preferably | QPQQPFP | 1594 | | | | |
| | More preferably | QPQQPF | 1595 | | | | |
| | Preferably | QPXQPF | 1596 | | | | |
| | Key | QXXQPF | 1597 | | | | |

E25
Spot No. 3

| | | | | Food in which | | | |
|---|---|---|---|---|---|---|---|
| | | | SEQ ID | cross-reactivity | Graph | | SEQ ID |
| Protein name | Gamma-gliadin P08453 | | NO | was confirmed | No. | Synthetic sequence | NO |
| 15-residue | PQQPAQLEAIRSLVL (positions 281-295 of | | 1598 | | | | |
| sequences | SEQ ID NO: 6) | | | | | | |
| P3 | Preferably | PQXXAQLXXIRSXVL | 1599 | | | | |
| | Key | XXXXAQLXXLRSXVL | 1600 | | | | |
| | Preferably | AQLEAIRSL | 1601 | | | | |
| | Key | AQLXXIRSX | 1602 | | | | |
| P10 | Preferably | XQQPAQLXALRSLVL | 1603 | | | | |
| | Key | XQQPAQLXXIRSXVX | 1604 | | | | |
| | More preferably | AQLEAIRS | 1605 | | | | |
| | Preferably | AQLXALRS | 1606 | | | | |
| | Key | AQLXXIRS | 1607 | | | | |

E26
Spot No. 13

| | | | | Food in which | | | |
|---|---|---|---|---|---|---|---|
| | | | SEQ ID | cross-reactivity | Graph | | SEQ ID |
| Protein name | Elongation factor 1-alpha Q03033 | | NO | was confirmed | No. | Synthetic sequence | NO |
| 15-residue | VGYNPDKVPFVPISG (positions 181-195 of | | 1608 | | | | |
| sequences | SEQ ID NO: 24) | | | | | | |
| P8 | Preferably | XGYXXDKVPXXPXXX | 1609 | | | | |
| | Key | XGYXXDKXXXXXXXX | 1610 | | | | |
| | Key | YNPD | 1611 | | | | |
| P15 | Key | XGYXPDKVXXXXXXX | 1612 | | | | |
| | Key | YNPD | 1613 | | | | |
| P16 | Key | YNPD | 1614 | | | | |
| P17 | Key | YNPD | 1615 | | | | |
| | Key | FVPISG | 1616 | | | | |
| P20 | Preferably | VPFVPISG | 1617 | | | | |
| | Key | FVPISG | 1618 | | | | |
| P21 | Key | FVPISG | 1619 | | | | |
| P24 | Preferably | YNPDKV | 1620 | | | | |
| | Key | YNPD | 1621 | | | | |
| P25 | Key | VGYXXXKXXXXXXXX | 1622 | | | | |
| | Key | YNPD | 1623 | | | | |
| | Key | FVPISG | 1624 | | | | |
| P26 | Key | XGYXXXKVXXXXXXX | 1625 | | | | |
| | Key | YNPD | 1626 | | | | |
| P27 | Key | XGYXXDKXXXXXXXX | 1627 | | | | |
| | Preferably | YNPDKVP | 1628 | | | | |
| | Key | YNPD | 1629 | | | | |
| | Key | PDKVPFVPIS | 1630 | | | | |
| P28 | Key | DKVPFVPISG | 1631 | | | | |
| P29 | Key | YNPD | 1632 | | | | |
| P31 | Key | YNPD | 1633 | | | | |
| P32 | Preferably | YNPDKVPF | 1634 | | | | |
| | Key | YNPD | 1635 | | | | |
| P33 | Key | XGYXXXKVXFXPXXX | 1636 | | | | |
| | Key | YNPDKVPF | 1637 | | | | |
| P34 | Key | XXYXXDKVXXXXXXX | 1638 | | | | |
| | Key | YNPDKV | 1639 | | | | |
| | Key | DKVPFVPISG | 1640 | | | | |
| P35 | Preferably | YNPDKVP | 1641 | | | | |
| | Key | YNPD | 1642 | | | | |
| | Key | PDKVPFVPIS | 1643 | | | | |
| P36 | Key | XXYXXXKVXXXXIXX | 1644 | | | | |
| | More preferably | YNPDKVPFV | 1645 | | | | |
| | Preferably | YNPDKVPF | 1646 | | | | |
| | Key | YNPD | 1647 | | | | |
| | Key | FVPISG | 1648 | | | | |
| P50 | Key | XGYXXXKVXXXXXXX | 1649 | | | | |
| | Preferably | YNPDKVPF | 1650 | | | | |
| | Key | NPDKVP | 1651 | | | | |
| P51 | Key | XGYXXDXVXXVXIXX | 1652 | | | | |
| | Preferably | YNPDKVPFV | 1653 | | | | |
| | Key | YNPDKVPF | 1654 | | | | |
| | Key | FVPISG | 1655 | | | | |
| P53 | Key | NPDKVPFV | 1656 | | | | |
| | Key | VPFVPISG | 1657 | | | | |
| P54 | Key | KVPFVPISG | 1658 | | | | |
| G1 | Preferably | YNPDKVPF | 1659 | | | | |
| | Key | YNPDK | 1660 | Wheat/rye/barley | 4 | YNPDK | 2902 |
| | Key | FVPISG | 1661 | Wheat/barley | 4 | FVPISG | 2903 |
| G2 | Key | XXYXXDKVXXXPXXX | 1662 | | | | |
| | Preferably | YNPDKVPFV | 1663 | | | | |
| | Key | YNPDKVPF | 1664 | | | | |
| | Key | VPFVPISG | 1665 | | | | |
| G3 | Preferably | YNPDKVP | 1666 | | | | |
| | Key | NPDKVP | 1667 | | | | |
| | Key | FVPISG | 1668 | | | | |
| G4 | More preferably | GYNPDKVPFV | 1669 | | | | |
| | Preferably | YNPDKVPFV | 1670 | | | | |
| | Key | YNPDKVPF | 1671 | | | | |
| | Key | PDKVPFVPIS | 1672 | | | | |
| G5 | More preferably | XGYXXDKVXXVPXXG | 1673 | | | | |
| | Preferably | XXXXXDKVXXVPXXG | 1674 | | | | |
| | Key | XXXXXDKVXXVPXXX | 1675 | | | | |
| | Preferably | KVPFVPISG | 1676 | | | | |
| | Key | PFVPISG | 1677 | | | | |
| G6 | Preferably | XXYXXDKVPXXPIXG | 1678 | | | | |
| | Key | XXYXXDKVXXXXIXX | 1679 | | | | |
| | More preferably | YNPDKVPF | 1680 | | | | |
| | Preferably | DKVPF | 1681 | | | | |
| | Key | DKVPX | 1682 | | | | |
| G9 | Key | YNPDKVPF | 1683 | | | | |
| | Key | FVPISG | 1684 | | | | |

E27
Spot No. 3

| | | | | Food in which | | | |
|---|---|---|---|---|---|---|---|
| | | | SEQ ID | cross-reactivity | Graph | | SEQ ID |
| Protein name | Elongation factor 1-alpha Q03033 | | NO | was confirmed | No. | Synthetic sequence | NO |
| 15-residue | PAKEAANFTSQVILM (positions 321-335 of | | 1685 | | | | |
| sequences | SEQ ID NO: 24) | | | | | | |
| P5 | Key | PXKXXANXXXXXXXX | 1686 | | | | |
| | Key | EAANFT | 1687 | | | | |
| P14 | Key | KEAA | 1688 | | | | |
| | Key | SQVILM | 1689 | | | | |
| P16 | Key | EAANFT | 1690 | | | | |
| P19 | Preferably | PXKXAANXXXQXXXM | 1691 | | | | |
| | Key | PXKXAAXXXXXXXXM | 1692 | | | | |
| | Preferably | KEAANFTS | 1693 | | | | |
| | Key | EAANFTS | 1694 | | | | |
| P20 | Key | EAANFT | 1695 | | | | |
| P21 | Preferably | PXKXXANFTXXXXXM | 1696 | | | | |
| | Key | XXKXXANFTXXXXXX | 1697 | | | | |
| | More preferably | KEAANFT | 1698 | | | | |
| | Preferably | EAANFT | 1699 | | | | |
| | Key | XXANFT | 1700 | | | | |
| P25 | Key | EAANFT | 1701 | | | | |
| | Key | SQVILM | 1702 | | | | |
| P27 | Key | EAANFT | 1703 | | | | |
| P28 | Key | EAANFT | 1704 | | | | |
| P29 | Key | PXKEAAXXXXXXXXM | 1705 | | | | |
| | Key | EAANFT | 1706 | | | | |
| | Key | SQVILM | 1707 | | | | |
| P34 | Preferably | PXKEAANFXSXXXXX | 1708 | | | | |
| | Key | XXKEAAXXXXXXXXX | 1709 | | | | |
| | More preferably | KEAANFTS | 1710 | | | | |
| | Preferably | KEAANFT | 1711 | | | | |
| | Key | EAANF | 1712 | | | | |
| P35 | Key | PXKXXXNXXSXXXXX | 1713 | | | | |
| | Preferably | KEAANF | 1714 | | | | |
| | Key | KEAA | 1715 | | | | |
| | Key | SQVILM | 1716 | | | | |
| P36 | Key | XXKEAANXXXXXXXM | 1717 | | | | |
| | More preferably | EAANFT | 1718 | | | | |
| | Preferably | EAANF | 1719 | | | | |
| | Key | EAANX | 1720 | | | | |
| P50 | Key | PXKXAXXXXSXXXXX | 1721 | | | | |
| | Preferably | KEAANFT | 1722 | | | | |
| | Key | KEAANF | 1723 | | | | |
| P51 | Preferably | PAKEXAXXXXXVXXX | 1724 | | | | |
| | Key | PXKEXAXXXXXXXXX | 1725 | | | | |
| | Preferably | KEAANFTS | 1726 | | | | |
| | Key | KEAANF | 1727 | | | | |
| P52 | Key | KEAANF | 1728 | | | | |
| | Preferably | ANFTSQVIIM | 1729 | | | | |
| | Key | SQVILM | 1730 | | | | |
| P53 | Key | PXKEAXXXXXXXXXX | 1731 | | | | |
| | Key | KEAA | 1732 | | | | |
| P56 | Key | XXKXXAXXTSXXXXX | 1733 | | | | |
| | Preferably | KEAANFT | 1734 | | | | |
| | Key | EAANFT | 1735 | | | | |
| P57 | Key | XXKEAAXXXXXXXXM | 1736 | | | | |
| | Preferably | KEAANFT | 1737 | | | | |
| | Key | EAANF | 1738 | | | | |
| G1 | Preferably | KEAANFT | 1739 | | | | |
| | Key | KEAANF | 1740 | Wheat/barley | 4 | KEAANF | 2904 |
| | Key | SQVILM | 1741 | Wheat/barley | 4 | SQVIIM | 2905 |
| G4 | Preferably | KEAAN | 1742 | | | | |
| | Key | EAAN | 1743 | | | | |
| G5 | Preferably | PAKEAAXXXXXXXXX | 1744 | | | | |
| | Key | PXKXAAXXXXXXXXX | 1745 | | | | |
| | Preferably | EAANFTS | 1746 | | | | |
| | Key | EAANFT | 1747 | | | | |
| G6 | Key | PXKXXAXXXSXXIXX | 1748 | | | | |
| | Key | EAANFT | 1749 | | | | |
| G7 | Key | KEAANFT | 1750 | | | | |
| | Key | SQVILM | 1751 | | | | |
| G8 | Key | ANFTSQVIIM | 1752 | | | | |

E28
Spot No. 13

| | | | | Food in which | | | |
|---|---|---|---|---|---|---|---|
| | | | SEQ ID | cross-reactivity | Graph | | SEQ ID |
| Protein name | Elongation factor 1-alpha Q03033 | | NO | was confirmed | No. | Synthetic sequence | NO |
| 15-residue | VKEVSSYLKKVGYNP (positions 171-185 of | | 1753 | | | | |
| sequences | SEQ ID NO: 24) | | | | | | |
| P7 | Key | XXXXXSYLKKVXXXX | 1754 | | | | |
| | Key | YLKK | 1755 | | | | |
| P8 | Key | VSSYLKK | 1756 | Wheat/rye/barley | 3 | VSSYLKK | 2906 |
| | Key | KVGYNP | 1757 | Wheat/rye/barley | 3 | KVGYNP | 2907 |
| P14 | Key | YLKK | 1758 | | | | |
| P17 | Key | YLKK | 1759 | | | | |
| P18 | Key | EVSSYLKKV | 1760 | | | | |
| | Key | YLKKVGYN | 1761 | | | | |
| P27 | Key | KEVSSYLKK | 1762 | | | | |
| | Key | LKKVGYN | 1763 | | | | |
| P30 | Key | KEVSSYLKKV | 1764 | | | | |
| | Key | YLKKVGYN | 1765 | | | | |
| P31 | Key | XXXVSXYXXXVGXXX | 1766 | | | | |
| P33 | Key | KKVGYNP | 1767 | | | | |
| P35 | Key | VSSYLKK | 1768 | | | | |
| | Key | KVGYNP | 1769 | | | | |
| P50 | Key | VSSYLKK | 1770 | | | | |
| | Key | KVGYNP | 1771 | | | | |
| P55 | Key | XXEXXXYLXXVXXXX | 1772 | | | | |
| | Key | EVSSYLKK | 1773 | | | | |
| | Preferably | YLKKVGYNP | 1774 | | | | |
| | Key | LKKVGYN | 1775 | | | | |
| G2 | Key | XXEVXSYXKXVXXXX | 1776 | | | | |
| | Key | KEVSSYLKK | 1777 | | | | |
| | Key | KVGY | 1778 | | | | |
| G3 | Key | XXXVSSYLXXVXXXP | 1779 | | | | |
| | Key | YLKKVG | 1780 | | | | |
| G4 | Key | KEVSSYLKKV | 1781 | | | | |
| | Key | VSSYLKKVGY | 1782 | | | | |
| | Key | KVGYNP | 1783 | | | | |
| G5 | Key | LKKVGYNP | 1784 | | | | |
| G7 | Key | LKKVGYNP | 1785 | | | | |
| G9 | Preferably | KEVSSYLKK | 1786 | | | | |
| | Key | KEVSSYLK | 1787 | | | | |
| | Key | LKKVGYNP | 1788 | | | | |

E29
Spot No. 3

| | | | | Food in which | | | |
|---|---|---|---|---|---|---|---|
| | | | SEQ ID | cross-reactivity | Graph | | SEQ ID |
| Protein name | Elongation factor 1-alpha Q03033 | | NO | was confirmed | No. | Synthetic sequence | NO |
| 15-residue | SGKELEALPKFLKNG (positions 371-385 of | | 1789 | | | | |
| sequences | SEQ ID NO: 24) | | | | | | |
| P3 | Key | SGKELE | 1790 | | | | |
| | Key | PKFL | 1791 | | | | |
| P8 | Key | SGKELE | 1792 | Wheat/rye/barley | 3 | SGKELE | 2908 |
| P9 | Key | SGKELEALPK | 1793 | | | | |
| P15 | Preferably | XXKXLEXXPXFLKNX | 1794 | | | | |
| | Key | XXXXXEXXXXFLKXX | 1795 | | | | |
| | Preferably | SGKELEALPK | 1796 | | | | |
| | Key | XXKXLEXXPX | 1797 | | | | |
| | Preferably | EALPKFLKN | 1798 | | | | |
| | Key | KFLK | 1799 | | | | |
| P17 | Key | KELEALPK | 1800 | | | | |
| | Key | LEALPKFLKN | 1801 | | | | |
| P18 | Preferably | SGKELEALPK | 1802 | | | | |
| | Key | SGKELE | 1803 | | | | |
| | Key | KFLKN | 1804 | | | | |
| P22 | Key | XXKEXEAXPXXXXXX | 1805 | | | | |
| | Key | ELEALPK | 1806 | | | | |
| | Key | PKFLKNG | 1807 | | | | |
| P26 | Key | SXXELEAXPXFLKXX | 1808 | | | | |
| | Preferably | ELEALPKFL | 1809 | | | | |
| | Key | ELEAXPXFL | 1810 | | | | |
| | Preferably | ALPKFLKNG | 1811 | | | | |
| | Key | AXPXFLKXX | 1812 | | | | |
| P27 | Key | XXKEXEXXPXXXXXX | 1813 | | | | |
| | Key | KELEAL | 1814 | | | | |
| P29 | Key | PKFLK | 1815 | | | | |
| P30 | Key | LEALPKFL | 1816 | | | | |
| P32 | Key | SGKELE | 1817 | | | | |
| | Key | PKFL | 1818 | | | | |
| P33 | Key | SGKELEALPK | 1819 | | | | |
| | Key | PKFLK | 1820 | | | | |
| P34 | Key | SGKELEALPK | 1821 | | | | |
| P35 | Key | SGKELEALPK | 1822 | | | | |
| | Key | LPKFL | 1823 | | | | |
| P36 | Key | LPKFLK | 1824 | | | | |
| P52 | Key | LPKF | 1825 | | | | |
| G1 | Key | PKFL | 1826 | Wheat/rye/barley | 4 | PKFL | 2909 |
| G4 | Key | XXXELEXXXXXLXXX | 1827 | | | | |
| | Key | LEALPKFLK | 1828 | | | | |
| G6 | Key | XXXELEXXPXXLXXX | 1829 | | | | |
| | Key | LPKFL | 1830 | | | | |
| G7 | Key | XXKXLEXXPXXXXXX | 1831 | | | | |
| | Key | KELE | 1832 | | | | |
| | Key | KFLKN | 1833 | | | | |
| G9 | Key | XXKELXXXPKFLKNX | 1834 | | | | |
| | Key | KFLK | 1 R15 | | | | |

E30
Spot No. 4

| | | | | Food in which | | | |
|---|---|---|---|---|---|---|---|
| | | | SEQ ID | cross-reactivity | Graph | | SEQ ID |
| Protein name | Fructose-b sphosphate aldolase W5CCA9 | | NO | was confirmed | No. | Synthetic sequence | NO |
| 15-residue | VIAEYTVRTLQRTVP (positions 233-247 of | | 1836 | | | | |
| sequences | SEQ ID NO: 8) | | | | | | |
| P3 | Preferably | VRTLQRT | 1837 | | | | |
| | Key | RTLQ | 1838 | | | | |
| P5 | Preferably | TVRTLQR | 1839 | | | | |
| | Key | RTLQ | 1840 | | | | |
| P8 | Preferably | YTVRTLQ | 1841 | | | | |
| | Key | TVRTLQ | 1842 | Wheat/rye/barley/ | 3 | TVRTLQ | 2911 |
| | | | | timothy | | | |
| P9 | Preferably | TVRTLQR | 1843 | | | | |
| | Key | TVRTLQ | 1844 | | | | |
| P12 | Preferably | YTVRTLQR | 1845 | | | | |
| | Key | TVRTLQR | 1846 | | | | |
| P16 | Key | XXXXYXVXXXQRXXX | 1847 | Wheat/rye/barley/ | 2 | VIAEYTVRTLQRTVP | 1836 |
| | | | | timothy | | SLAEYTVRTLQRTVP | 2910 |
| | More preferably | YTVRTLQRT | 1848 | | | | |
| | Preferably | TVRTLQR | 1849 | | | | |
| | Key | VRTLQ | 1850 | | | | |
| P17 | Key | XXXXYTVXXXXRXXX | 1851 | | | | |
| | More preferably | YTVRTLQRT | 1852 | | | | |
| | Preferably | TVRTLQR | 1853 | | | | |
| | Key | RTLQR | 1854 | | | | |
| P18 | Key | XXXXYTVXXXQRXXP | 1855 | | | | |
| | More preferably | YTVRTLQRT | 1856 | | | | |
| | Preferably | TVRTLQR | 1857 | | | | |
| | Key | RTLQ | 1858 | | | | |
| P19 | Preferably | YTVRTLQR | 1859 | | | | |
| | Key | TVRTLQ | 1860 | | | | |
| P24 | Preferably | TVRTLQRT | 1861 | | | | |
| | Key | VRTLQ | 1862 | | | | |
| P25 | Key | VIAEYTVRTL | 1863 | | | | |
| | Key | TVRTLQR | 1864 | | | | |
| P26 | Key | TVRTLQR | 1865 | | | | |
| P27 | Key | TVRTLQR | 1866 | | | | |
| P28 | Preferably | TVRTLQR | 1867 | | | | |
| | Key | TVRTLQ | 1868 | | | | |
| P29 | More preferably | YTVRTLQRT | 1869 | | | | |
| | Preferably | YTVRTLQR | 1870 | | | | |
| | Key | VRTLQR | 1871 | | | | |
| P30 | Preferably | YTVRTLQRT | 1872 | | | | |
| | Key | TVRTLQR | 1873 | | | | |
| P31 | Key | XXXXYTVXXLXRXXX | 1874 | | | | |
| | More preferably | TVRTLQRTV | 1875 | | | | |
| | Preferably | VRTLQRT | 1876 | | | | |
| | Key | TLQR | 1877 | | | | |
| P32 | Preferably | TVRTLQRT | 1878 | | | | |
| | Key | TVRTLQ | 1879 | | | | |
| P33 | Preferably | TVRTLQRT | 1880 | | | | |
| | Key | TVRTLQR | 1881 | | | | |
| P34 | Preferably | TVRTLQRT | 1882 | | | | |
| | Key | VRTLQ | 1883 | | | | |
| P35 | Preferably | TVRTLQRT | 1884 | | | | |
| | Key | RTLQ | 1885 | | | | |
| P36 | Key | TVRTLQRT | 1886 | | | | |
| G5 | Preferably | YTVRTLQRTV | 1887 | | | | |
| | Key | TVRTLQRT | 1888 | | | | |
| G6 | Preferably | TVRTLQR | 1889 | | | | |
| | Key | RTLQ | 1890 | | | | |
| G7 | Key | YTVRTL | 1891 | | | | |
| G9 | Key | XXXXYTVXXLQRTXP | 1892 | | | | |
| | Preferably | YTVRTLQRT | 1893 | | | | |
| | Key | VRTLQ | 1894 | | | | |

E31
Spot No. 1, 5, 6

| | | | | Food in which | | | |
|---|---|---|---|---|---|---|---|
| | | | SEQ ID | cross-reactivity | Graph | | SEQ ID |
| Protein name | Alpha-gliadin (Fragment) A0A0E3Z522 | | NO | was confirmed | No. | Synthetic sequence | NO |
| 15-residue | QVPLVQQQQFPGQQQ (positions 41-55 of | | 1895 | | | | |
| sequences | SEQ ID NOs: 2, 10 and 12) | | | | | | |
| P2 | Preferably | VPLVQQQ | 1896 | | | | |
| | Key | VPLVQQ | 1897 | | | | |
| | Key | QQFPGQQQ | 1898 | | | | |
| P3 | Key | QXXLVQQXXXXXXXX | 1899 | | | | |
| | Preferably | QVPLVQQ | 1900 | | | | |
| | Key | VPLVQ | 1901 | | | | |
| | Key | QQFPGQQ | 1902 | | | | |
| P4 | Key | QVXXXQQXXXXXXXX | 1903 | | | | |
| | Preferably | QVPLVQQ | 1904 | | | | |
| | Key | VPLVQ | 1905 | | | | |
| | Key | QFPGQQQ | 1906 | | | | |
| P7 | Key | QVXXXQQXXXXXXXX | 1907 | | | | |
| | Preferably | QVPLVQQ | 1908 | | | | |
| | Key | VPLVQ | 1909 | | | | |
| | Key | QFPGQQQ | 1910 | | | | |
| P8 | Key | QXXLVQQXXXXXXXX | 1911 | | | | |
| | Preferably | QVPLVQQQ | 1912 | | | | |
| | Key | QVPLVQQ | 1913 | Wheat/rye/barley | 3 | QVPLVQQ | 2912 |
| | Key | QQFPGQQ | 1914 | Wheat/rye | 3 | QQFPGQQ | 2913 |
| P9 | Key | QVPLVQQQQ | 1915 | | | | |
| | Key | QQQQFPGQQQ | 1916 | | | | |
| P10 | Key | QXXXVQQXXXXXXQQ | 1917 | | | | |
| | Preferably | QVPLVQQQQ | 1918 | | | | |
| | Key | VPLVQQQ | 1919 | | | | |
| | Key | LVQQQQFPGQ | 1920 | | | | |
| P12 | Preferably | QVPLVQQQ | 1921 | | | | |
| | Key | QVPLVQQ | 1922 | | | | |
| | Preferably | QQFPGQQQ | 1923 | | | | |
| | Key | FPGQQ | 1924 | | | | |
| P13 | Key | QFPGQQ | 1925 | | | | |
| P14 | Preferably | QQQFPGQQQ | 1926 | | | | |
| | Key | QFPGQQ | 1927 | | | | |
| P15 | Key | VPLVQQQ | 1928 | | | | |
| | Preferably | QFPGQQQ | 1929 | | | | |
| | Key | FPGQQQ | 1930 | | | | |
| P17 | Key | QXXXVQQXXXXXXXQ | 1931 | | | | |
| | Preferably | QVPLVQQQ | 1932 | | | | |
| | Key | VPLVQQ | 1933 | | | | |
| P19 | Preferably | XXXXVQQQQXXXQQQ | 1934 | | | | |
| | Key | XXXXXQQXXXXXXQQ | 1935 | | | | |
| | Key | QVPLVQQ | 1936 | | | | |
| | Preferably | QQFPGQQQ | 1937 | | | | |
| | Key | QFPGQQ | 1938 | | | | |
| P21 | Preferably | QVPLVQQ | 1939 | | | | |
| | Key | VPLVQ | 1940 | | | | |
| | More preferably | QQFPGQQQ | 1941 | | | | |
| | Preferably | QQFPGQQ | 1942 | | | | |
| | Key | QFPGQQ | 1943 | | | | |
| P22 | More preferably | QFPGQQQ | 1944 | | | | |
| | Preferably | FPGQQ | 1945 | | | | |
| | Key | FPGQ | 1946 | | | | |
| P24 | Key | XXXXXQQXXXXXQQQ | 1947 | | | | |
| | Preferably | QVPLVQQQ | 1948 | | | | |
| | Key | VPLVQQ | 1949 | | | | |
| | More preferably | QQQFPGQQQ | 1950 | | | | |
| | Preferably | QFPGQQQ | 1951 | | | | |
| | Key | QFPGQQ | 1952 | | | | |
| P26 | Key | XXXXXXXQXXPGQQX | 1953 | | | | |
| | Preferably | QQFPGQQ | 1954 | | | | |
| | Key | QFPGQ | 1955 | | | | |
| P28 | Preferably | XXXXXXXQXXPGQQQ | 1956 | | | | |
| | Key | XXXXXXXXXXPGQQQ | 1957 | | | | |
| | More preferably | QQFPGQQQ | 1958 | | | | |
| | Preferably | QFPGQQ | 1959 | | | | |
| | Key | XXPGQQ | 1960 | | | | |
| P32 | Preferably | QQQQFPGQQ | 1961 | | | | |
| | Key | QQQFPGQQ | 1962 | | | | |
| P33 | Key | XXXXXQXQQXXXQQQ | 1963 | | | | |
| | More preferably | QQQFPGQQ | 1964 | | | | |
| | Preferably | QQFPGQQ | 1965 | | | | |
| | Key | QFPGQQ | 1966 | | | | |
| P34 | Key | VPLVQQQ | 1967 | | | | |
| | Key | QFPGQQ | 1968 | | | | |
| P35 | More preferably | QVXLVQQXXXPGQQQ | 1969 | | | | |
| | Preferably | QXXLVQQXXXXXXXQ | 1970 | | | | |
| | Key | XXXLVQQXXXXXXXX | 1971 | | | | |
| | More preferably | QVPLVQQQQ | 1972 | | | | |
| | Preferably | QVPLVQQQ | 1973 | | | | |
| | Key | VPLVQQ | 1974 | | | | |
| P50 | Key | LVQQQQFP | 1975 | | | | |
| G6 | Key | XXXXXXXXXFPGQXX | 1976 | | | | |

E32
Spot No. 13

| | | | | Food in which | | | |
|---|---|---|---|---|---|---|---|
| | | | SEQ ID | cross-reactivity | Graph | | SEQ ID |
| Protein name | Elongation factor 1-alpha Q03033 | | NO | was confirmed | No. | Synthetic sequence | NO |
| 15-residue | DPTGAKVTKAAIKKK (positions 433-447 of | | 1977 | | | | |
| sequences | SEQ ID NO: 24) | | | | | | |
| P2 | Preferably | PTGAKVTK | 1978 | | | | |
| | Key | TGAK | 1979 | | | | |
| | Key | AAIKK | 1980 | | | | |
| P12 | Key | DPTGAK | 1981 | | | | |
| P13 | | | | | | | |
| P14 | Key | PTGAK | 1982 | | | | |
| | Key | GAKVTKAAIK | 1983 | | | | |
| P15 | Key | DPXGXKXXXXXXXXX | 1984 | | | | |
| | Key | PTGAKVTK | 1985 | | | | |
| P17 | Key | AAIK | 1986 | | | | |
| P21 | Preferably | KAAIKK | 1987 | | | | |
| | Key | AAIK | 1988 | | | | |
| P22 | Key | XXXXXXXXKAAIKXX | 1989 | | | | |
| P26 | Preferably | XPXGAKVTKAAIKXX | 1990 | | | | |
| | Key | XXXXXXVXKAAIKXX | 1991 | | | | |
| | Key | TGAK | 1992 | | | | |
| P28 | Key | XXXXAXXTKAAIKXX | 1993 | | | | |
| P32 | Key | XXXXXXVTXAAXXXX | 1994 | | | | |
| | Key | DPTGAKVTK | 1995 | | | | |
| P35 | Key | VTKAA | 1996 | | | | |
| P36 | Key | XXXXAKVXXXAXXXX | 1997 | | | | |
| | Key | KVTK | 1998 | | | | |
| P52 | Preferably | DPTGAKVTKAAIXXX | 1999 | | | | |
| | Key | XXXXXKVTXAAIXXX | 2000 | | | | |
| | Key | GAKVTK | 2001 | | | | |
| P55 | Preferably | XXXXAKVTKAAXXXX | 2002 | | | | |
| | Key | XXXXXKVTXXAXXXX | 2003 | | | | |

E33
Spot No. 4

| | | | | Food in which | | | |
|---|---|---|---|---|---|---|---|
| | | | SEQ ID | cross-reactivity | Graph | | SEQ ID |
| Protein name | Fructose-b sphosphate aldolase W5CCA9 | | NO | was confirmed | No. | Synthetic sequence | NO |
| 15-residue | STGTIGKRFASLNVE (positions 23-37 of | | 2004 | | | | |
| sequences | SEQ ID NO: 8) | | | | | | |
| P2 | Key | XXXXXGXRXASXXXX | 2005 | | | | |
| | Key | ASLNV | 2006 | | | | |
| P8 | Key | XTXTIGXRXXXXXXX | 2007 | | | | |
| P12 | Preferably | KRFASI | 2008 | | | | |
| | Key | KRFA | 2009 | | | | |
| P15 | Key | KRFA | 2010 | | | | |
| P17 | Key | KRFA | 2011 | | | | |
| P21 | Key | XXGTIGXRXXXXNXX | 2012 | | | | |
| P22 | Key | XXGTIGXRXXXXXXX | 2013 | | | | |
| | Key | KRFA | 2014 | | | | |
| P24 | Key | KRFAS | 2015 | | | | |
| P26 | Key | XXXTIGXRXXXXXXX | 2016 | | | | |
| P27 | Key | TGTIGKRF | 2017 | | | | |
| | Key | KRFASLN | 2018 | | | | |
| P34 | Key | KRFASLN | 2019 | | | | |
| P35 | Key | STGTIGKRFA | 2020 | | | | |
| | Key | GKRFASLN | 2021 | | | | |
| P51 | Key | RFASIN | 2022 | | | | |
| P52 | Key | KRFASLN | 2023 | | | | |
| G6 | Key | KRFA | 2024 | | | | |
| G7 | Key | TGTIG | 2025 | | | | |
| | Key | KRFASLN | 2026 | | | | |

E34
Spot No. 4

| | | | | Food in which | | | |
|---|---|---|---|---|---|---|---|
| | | | SEQ ID | cross-reactivity | Graph | | SEQ ID |
| Protein name | Fructose-bisphosphate aldolase W5CCA9 | | NO | was confirmed | No. | Synthetic sequence | NO |
| 15-residue | TPGALQYLSGVLLFE (positions 53-67 of | | 2027 | | | | |
| sequences | SEQ ID NO: 8) | | | | | | |
| P3 | Key | PGALQYLSGV | 2028 | | | | |
| | Preferably | YLSGVLLF | 2029 | | | | |
| | Key | GVILF | 2030 | | | | |
| P8 | Key | YLSGV | 2031 | Wheat/rye/barley | 3 | YLSGV | 2914 |
| P12 | Preferably | YLSGVLLF | 2032 | | | | |
| | Key | YLSGV | 2033 | | | | |
| P14 | Key | PGALQYLS | 2034 | | | | |
| | Preferably | YLSGVLLF | 2035 | | | | |
| | Key | GVILF | 2036 | | | | |
| P15 | Key | PGALQYLSGV | 2037 | | | | |
| | Preferably | YLSGVLLF | 2038 | | | | |
| | Key | LSGVIL | 2039 | | | | |
| P16 | Key | YLSGVLLF | 2040 | | | | |
| P17 | Key | PGALQYLSGV | 2041 | | | | |
| | Key | YLSGVLLF | 2042 | | | | |
| P19 | Key | XPXXXQYXSXXXXFX | 2043 | | | | |
| | Preferably | YLSGVLLFE | 2044 | | | | |
| | Key | YLSGVLLF | 2045 | | | | |
| P24 | Key | PGALQYLSGV | 2046 | | | | |
| | Preferably | YLSGVLL | 2047 | | | | |
| | Key | GVIL | 2048 | | | | |
| P26 | Key | GALQ | 2049 | | | | |
| | Key | GVILF | 2050 | | | | |
| P28 | Key | PGALQYLSGV | 2051 | | | | |
| | Key | YLSGVLLF | 2052 | | | | |
| P29 | Preferably | PGALQYLSGV | 2053 | | | | |
| | Key | GALQ | 2054 | | | | |
| | Preferably | YLSGVLLF | 2055 | | | | |
| | Key | GVILF | 2056 | | | | |
| P30 | Key | PGALQ | 2057 | | | | |
| | Key | YLSGVLLF | 2058 | | | | |
| P32 | Key | YLSGVI | 2059 | | | | |
| P33 | Preferably | YLSGVLLF | 2060 | | | | |
| | Key | LSGV | 2061 | | | | |
| P34 | Key | LSGVIL | 2062 | | | | |
| P35 | Key | TPGALQYLS | 2063 | | | | |
| | Preferably | YLSGVLLF | 2064 | | | | |
| | Key | GVILF | 2065 | | | | |
| P36 | Preferably | YLSGVLLF | 2066 | | | | |
| | Key | GVIL | 2067 | | | | |

E35
Spot No. 6

| | | | | Food in which | | | |
|---|---|---|---|---|---|---|---|
| | | | SEQ ID | cross-reactivity | Graph | | SEQ ID |
| Protein name | Alpha-gliadin (Fragment) A0A0E3Z522 | | NO | was confirmed | No. | Synthetic sequence | NO |
| 15-residue | PPYCTIAPFGIFGTN (positions 281-295 of | | 2068 | | | | |
| sequences | SEQ ID NO: 12) | | | | | | |
| P3 | Key | XXYXTXAPFGLFGTN | 2069 | | | | |
| | Preferably | YCTIAPFGI | 2070 | | | | |
| | Key | CTIAP | 2071 | | | | |
| | Preferably | PFGIFGTN | 2072 | | | | |
| | Key | PFXIFXXX | 2073 | | | | |
| P8 | Key | CTIAPFGIF | 2074 | Wheat/barley | 3 | CTIAPFGIF | 2915 |
| | Preferably | PFGIFGTN | 2075 | | | | |
| | Key | GLFGTN | 2076 | Wheat/barley/rye 3 | GLFGTN | 2916 | |
| P10 | Key | CTIAP | 2077 | | | | |
| P12 | Preferably | YCTIAPFGI | 2078 | | | | |
| | Key | CTIAPFGI | 2079 | | | | |
| | Preferably | PFGIFGTN | 2080 | | | | |
| | Key | GLFGTN | 2081 | | | | |
| P17 | Key | XXYXXXXPFXLFXTN | 2082 | | | | |
| | Preferably | YCTIAPFGLF | 2083 | | | | |
| | Key | CTIAPFGI | 2084 | | | | |
| | Key | PFGIFGTN | 2085 | | | | |
| P21 | Preferably | YCTIAPFGLF | 2086 | | | | |
| | Key | CTIAPFGI | 2087 | | | | |
| | Key | GLFGTN | 2088 | | | | |
| P24 | Preferably | YCTIAPFGLF | 2089 | | | | |
| | Key | CTIAP | 2090 | | | | |
| | Preferably | PFGIFGTN | 2091 | | | | |
| | Key | PFXIFXXX | 2092 | | | | |
| P25 | Preferably | YCTIAPFGI | 2093 | | | | |
| | Key | CTIAPFG | 2094 | | | | |
| | Key | GLFGTN | 2095 | | | | |
| P26 | Key | CTIAPFGI | 2096 | | | | |
| | Key | PFGIFGTN | 2097 | | | | |
| P27 | Key | CTIAPFGIF | 2098 | | | | |
| | Preferably | PFXIFXXX | 2099 | | | | |
| | Key | PFGIFGTN | 2100 | | | | |
| P28 | Key | XXYXXXXPFXXFXXX | 2101 | | | | |
| | Preferably | CTIAPFGIF | 2102 | | | | |
| | Key | CTIAP | 2103 | | | | |
| | Key | PFGIFGTN | 2104 | | | | |
| P29 | Key | CTIAPFGIF | 2105 | | | | |
| | Key | FGLFGTN | 2106 | | | | |
| P30 | Key | CTIAPFGIF | 2107 | | | | |
| | Key | GLFGTN | 2108 | | | | |
| P32 | Key | CTIAPFGIF | 2109 | | | | |
| | Key | PFGIFGTN | 2110 | | | | |
| P33 | Key | XXYXXXAPFGLFGXN | 2111 | | | | |
| | Preferably | YCTIAPFGLF | 2112 | | | | |
| | Key | YCTIAP | 2113 | | | | |
| | Key | PFGIFGTN | 2114 | | | | |
| P34 | Preferably | CTIAPFGIF | 2115 | | | | |
| | Key | CTIAP | 2116 | | | | |
| | Preferably | PFGIFGTN | 2117 | | | | |
| | Key | PFXIFXXX | 2118 | | | | |
| P35 | Preferably | CTIAPFGI | 2119 | | | | |
| | Key | CTIA | 2120 | | | | |
| | Key | PFGIFGTN | 2121 | | | | |
| P36 | Key | XXXXXXXPFXLFXXN | 2122 | | | | |
| | Preferably | YCTIAPFGLF | 2123 | | | | |
| | Key | CTIAPFGI | 2124 | | | | |
| | Key | FGLFGTN | 2125 | | | | |
| P50 | Key | XXXXXXXPFXLFXXX | 2126 | | | | |
| | Key | CTIAP | 2127 | | | | |
| P51 | Key | XXYXTXXPFGLFXXX | 2128 | | | | |
| | Key | YCTIAPFGLF | 2129 | | | | |
| | Key | PFGIFGTN | 2130 | | | | |
| P52 | Key | XXXXXXXPFXIFXXX | 2131 | | | | |
| | Preferably | YCTIAPFGIF | 2132 | | | | |
| | Key | YCTIAPFGI | 2133 | | | | |
| P53 | Key | XXXXXXXPFXIFXXN | 2134 | | | | |
| | Key | PPYCTIAPFG | 2135 | | | | |
| | Preferably | CTIAPFGIF | 2136 | | | | |
| | Key | XXXXPFXIF | 2137 | | | | |
| | Key | FGTN | 2138 | | | | |
| P55 | Key | XXYXXXXPFGIFGTN | 2139 | | | | |
| | More preferably | YCTIAPFGIF | 2140 | | | | |
| | Preferably | YXXXXPFGLF | 2141 | | | | |
| | Key | XXXXXPFGLF | 2142 | | | | |
| | More preferably | IAPFGIFGTN | 2143 | | | | |
| | Preferably | FGIFGTN | 2144 | | | | |
| | Key | FGIFXXX | 2145 | | | | |
| G6 | Key | XXXXXXXPFXIFXXX | 2146 | | | | |
| | More preferably | CTIAPFGIF | 2147 | | | | |
| | Preferably | PFGLFGTN | 2148 | | | | |
| | Key | FGIF | 2149 | | | | |
| G7 | Key | XXXXXXXPFGIFXXX | 2150 | | | | |
| | Key | YCTIAPFGI | 2151 | | | | |
| | Preferably | IAPFGIFGTN | 2152 | | | | |
| | Key | GIFGTN | 2153 | | | | |

E36
Spot No. 1, 6, 14

| | | | | Food in which | | | |
|---|---|---|---|---|---|---|---|
| | | | SEQ ID | cross-reactivity | Graph | | SEQ ID |
| Protein name | Alpha/beta-gliadin MM1 P18573 | | NO | was confirmed | No. | Synthetic sequence | NO |
| 15-residue | YSQPQQPISQQQQQQ (positions 121- | | 2154 | | | | |
| sequences | 135 of SEQ ID NO: 2, positions | | | | | | |
| | 07-121 of SEQ ID NOs: 12 and 28) | | | | | | |
| P2 | More preferably | YSQPQQPISQ | 2155 | | | | |
| | Preferably | YSQPQQPIS | 2156 | | | | |
| | Key | SQPQQ | 2157 | | | | |
| P12 | Key | YSQPQQPISQ | 2158 | | | | |
| P20 | Preferably | YSQPQQPI | 2159 | | | | |
| | Key | SQPQQ | 2160 | | | | |
| P21 | Preferably | PQQPISQQQ | 2161 | | | | |
| | Key | QQPISQ | 2162 | | | | |
| P22 | Preferably | SQPQQPISQ | 2163 | | | | |
| | Key | SQPQQ | 2164 | | | | |
| P24 | More preferably | YSQPQQPISQ | 2165 | | | | |
| | Preferably | SQPQQPIS | 2166 | | | | |
| | Key | SQPQQ | 2167 | | | | |
| P25 | Key | YXXXXXXXXXXQQQX | 2168 | | | | |
| | More preferably | YSQPQQPI | 2169 | | | | |
| | Preferably | SQPQQP | 2170 | | | | |
| | Key | SQPQQ | 2171 | | | | |
| | Key | QQPISQQQQQ | 2172 | | | | |
| P26 | More preferably | YSQPQQPISQ | 2173 | | | | |
| | Preferably | YSQPQQ | 2174 | | | | |
| | Key | SQPQQ | 2175 | | | | |
| P27 | Preferably | YSQPQQPISQ | 2176 | | | | |
| | Key | SQPQQ | 2177 | | | | |
| P28 | More preferably | YSQPQQPISQ | 2178 | | | | |
| | Preferably | YSQPQQPI | 2179 | | | | |
| | Key | SQPQQ | 2180 | | | | |
| P29 | More preferably | YSQPQQPISQ | 2181 | | | | |
| | Preferably | SQPQQ | 2182 | | | | |
| | Key | QPQQ | 2183 | | | | |
| P30 | More preferably | YSQPQQPISQ | 2184 | | | | |
| | Preferably | YSQPQQPI | 2185 | | | | |
| | Key | SQPQQ | 2186 | | | | |
| P31 | Key | SQPQQ | 2187 | | | | |
| P32 | Key | YXQXXXXXXXXQQXX | 2188 | | | | |
| | Preferably | YSQPQQPISQ | 2189 | | | | |
| | Key | QPQQ | 2190 | | | | |
| P33 | Preferably | SQPQQ | 2191 | | | | |
| | Key | QPQQ | 2192 | | | | |
| P34 | Key | SQPQQ | 2193 | | | | |
| P35 | Preferably | YSQPQQ | 2194 | | | | |
| | Key | SQPQQ | 2195 | | | | |
| P36 | Preferably | YSQPQQPISQ | 2196 | | | | |
| | Key | SQPQQ | 2197 | | | | |
| P50 | Key | SQPQQ | 2198 | | | | |
| P53 | Key | YXXXQXXXXXQQQXX | 2199 | | | | |
| | More preferably | YSQPQQPISQ | 2200 | | | | |
| | Preferably | YSQPQQPI | 2201 | | | | |
| | Key | SQPQQ | 2202 | | | | |
| | Key | SQQQQQQ | 2203 | | | | |
| P54 | Key | YXXXXXXXXXQQQQQ | 2204 | | | | |
| | Preferably | YSQPQQPIS | 2205 | | | | |
| | Key | SQPQQPI | 2206 | | | | |
| | Preferably | QQPISQQQQQ | 2207 | | | | |
| | Key | XXXXXXQQQQ | 2208 | | | | |
| G5 | Preferably | YSQPQQ | 2209 | | | | |
| | Key | SQPQQ | 2210 | | | | |
| G6 | Preferably | YSQPQQPISQ | 2211 | | | | |
| | Key | SQPQQ | 2212 | | | | |
| G7 | Preferably | YSQPQQPISQ | 2213 | | | | |
| | Key | QPQQ | 2214 | | | | |
| G9 | Preferably | YSQPQQPIS | 2215 | | | | |
| | Key | SQPQQ | 2216 | | | | |

E37
Spot No. 11, 12

| | | | | Food in which | | | |
|---|---|---|---|---|---|---|---|
| | | | SEQ ID | cross-reactivity | Graph | | SEQ ID |
| Protein name | Globulin 3 B7U6L4 | | NO | was confirmed | No. | Synthetic sequence | NO |
| 15-residue | VSRLLRGLRNYRVAI (positions 161-175 of | | 2217 | | | | |
| sequences | SEQ ID NO: 22) | | | | | | |
| P2 | Key | SRLLRGLRNY | 2218 | | | | |
| | Preferably | IRNYRVAI | 2219 | | | | |
| | Key | NYRV | 2220 | | | | |
| P7 | Key | LRNYR | 2221 | | | | |
| P8 | Key | RLLRGIRNY | 2222 | Wheat | 3 | RLLRGIRNY | 2917 |
| | Key | LRNYRVA | 2223 | Wheat | 3 | IRNYRVA | 2918 |
| P16 | Key | LRNYRVA | 2224 | | | | |
| P17 | Key | VSRLLRGLRN | 2225 | | | | |
| | Key | RNYR | 2226 | | | | |
| P18 | Key | LLRGLRN | 2227 | | | | |
| | Key | NYRVAI | 2228 | | | | |
| P21 | Key | XXXXXRGIXNYXXXX | 2229 | | | | |
| | Key | LRNYRV | 2230 | | | | |
| P28 | Key | LRNY | 2231 | | | | |
| P29 | Key | XXXXXRGXXNYXXXI | 2232 | | | | |
| | Preferably | IRNYRVAI | 2233 | | | | |
| | Key | RNYR | 2234 | | | | |
| P30 | Key | SRLLRGLRN | 2235 | | | | |
| | Preferably | IRNYRVAI | 2236 | | | | |
| | Key | NYRV | 2237 | | | | |
| P31 | Key | LLRGLRNYRV | 2238 | | | | |
| | Key | NYRVAI | 2239 | | | | |
| P32 | Key | LRNYRVAI | 2240 | | | | |
| P34 | Key | RLLRGIRN | 2241 | | | | |
| P35 | Key | LRNYRVAI | 2242 | | | | |
| P36 | Key | RLLRGIRNY | 2243 | | | | |
| | Key | RNYRVA | 2244 | | | | |
| P50 | Preferably | SRLLRGLR | 2245 | | | | |
| | Key | SRLLR | 2246 | | | | |
| | Key | LLRGLRNYRV | 2247 | | | | |
| | Key | LRNYRVAI | 2248 | | | | |
| P52 | Key | XXXXLXXIXNYXXXX | 2249 | | | | |
| | Preferably | SRLLRGLRN | 2250 | | | | |
| | Key | SRLLRGLR | 2251 | | | | |
| | More preferably | LLRGLRNYRV | 2252 | | | | |
| | Preferably | RNYRVAI | 2253 | | | | |
| | Key | NYRV | 2254 | | | | |
| P53 | Preferably | LLRGLRNYRV | 2255 | | | | |
| | Key | LRGLRN | 2256 | | | | |
| P55 | Key | SRLLRGLRN | 2257 | | | | |
| | Preferably | LRGLRNYRVA | 2258 | | | | |
| | Key | RNYRV | 2259 | | | | |
| G1 | Key | SRLLR | 2260 | Wheat/barley | 4 | SRLLR | 2919 |
| | Key | LLRGLRNYRV | 2261 | Wheat | 4 | LLRGIRNYRV | 2920 |
| | Key | RNYRVAI | 2262 | Wheat | 4 | RNYRVAI | 2921 |
| G6 | Key | SRLLR | 2263 | | | | |
| | Key | NYRVAI | 2264 | | | | |

E38
Spot No. 13

| | | | | Food in which | | | |
|---|---|---|---|---|---|---|---|
| | | | SEQ ID | cross-reactivity | Graph | | SEQ ID |
| Protein name | Elongation factor 1-alpha Q03033 | | NO | was confirmed | No. | Synthetic sequence | NO |
| 15-residue | LGGIDKRVIERFEKE (positions 31-45 of SEQ | | 2265 | | | | |
| sequences | ID NO: 24) | | | | | | |
| P5 | Key | GGIDKRV | 2266 | | | | |
| | Preferably | KRVIERFEK | 2267 | | | | |
| | Key | ERFEK | 2268 | | | | |
| P7 | Key | LGGLDK | 2269 | | | | |
| | Key | DKRVIERFEK | 2270 | | | | |
| P8 | More preferably | LGGLDKRV | 2271 | | | | |
| | Preferably | GIDKRVIERF | 2272 | | | | |
| | Key | GIDKRV | 2273 | Wheat/barley | 3 | GLDKRV | 2922 |
| | Preferably | DKRVIERFEK | 2274 | | | | |
| | Key | KRVIERFEK | 2275 | Wheat/barley | 3 | KRVLERFEK | 2923 |
| P10 | Key | GGIDK | 2276 | | | | |
| | Key | DKRVIERFEK | 2277 | | | | |
| P14 | Key | LXXXXKXXXXRFXKE | 2278 | | | | |
| | Key | LGGLDK | 2279 | | | | |
| | Preferably | DKRVIERFEK | 2280 | | | | |
| | Key | XKXXXXRFXK | 2281 | | | | |
| P18 | Key | IDKRVIER | 2282 | | | | |
| | Key | ERFEKE | 2283 | | | | |
| P26 | Preferably | LGGLDK | 2284 | | | | |
| | Key | GIDK | 2285 | | | | |
| | Preferably | DKRVIERFEK | 2286 | | | | |
| | Key | KRVIERFEK | 2287 | | | | |
| P27 | Key | KRVIERF | 2288 | | | | |
| P33 | Key | GGIDK | 2289 | | | | |
| | Key | DKRVIERFE | 2290 | | | | |
| P34 | Key | LGGLDK | 2291 | | | | |
| | Preferably | KRVIERFEK | 2292 | | | | |
| | Key | ERFE | 2293 | | | | |
| P50 | More preferably | LGGLDKRVIE | 2294 | | | | |
| | Preferably | LGGLDKRV | 2295 | | | | |
| | Key | GIDK | 2296 | | | | |
| | Key | ERFEK | 2297 | | | | |
| G1 | Key | LXXXXKXXXXRXXKX | 2298 | | | | |
| | Key | GIDK | 2299 | Wheat/rye/ | 4 | GIDK | 2924 |
| | | | | orchard grass | | | |
| | Key | DKRVIERFEK | 2300 | Wheat | 4 | DKRVIERFEK | 2925 |
| G4 | Key | LGGLDK | 2301 | | | | |
| | Key | IDKRVIERFE | 2302 | | | | |
| G7 | Key | LGGLDK | 2303 | | | | |
| | Key | DKRVIERFE | 2304 | | | | |
| G9 | Preferably | LGGLDK | 2305 | | | | |
| | Key | GIDK | 2306 | | | | |
| | Preferably | RVLERFEK | 2307 | | | | |
| | Key | ERFEK | 2308 | | | | |

E39
Spot No. 9

| | | | | Food in which | | | |
|---|---|---|---|---|---|---|---|
| | | | SEQ ID | cross-reactivity | Graph | | SEQ ID |
| Protein name | LMW-GS B2BZD1 | | NO | was confirmed | No. | Synthetic sequence | NO |
| 15-residue | QSRYDAIRAIIYSIV (positions 241-255 of | | 2309 | | | | |
| sequences | SEQ ID NO: 18) | | | | | | |
| P21 | Key | XXRXXXXRAIXYXXX | 2310 | | | | |
| P22 | Key | XXRXDXXRXIXYXXX | 2311 | | | | |
| P25 | Preferably | XXRYDXXRAIIYSXV | 2312 | | | | |
| | Key | XXXXXXXRXIXYXXV | 2313 | | | | |
| | Key | SRYDALR | 2314 | | | | |
| | Key | IIYS | 2315 | | | | |
| P26 | Key | XXXXXXXRAIXYXXX | 2316 | | | | |
| P27 | Preferably | XXRYXXXRAIIYSIX | 2317 | | | | |
| | Key | XXXXXXXRAIXYXXX | 2318 | | | | |
| P29 | Key | XXRXXXXRXIXYXXX | 2319 | | | | |
| P30 | Key | XXRXXXXRAIXYSIV | 2320 | | | | |
| P31 | More preferably | XXRXXXXRAIXYSIV | 2321 | | | | |
| | Preferably | XXRXXXXRAIXYXIX | 2322 | | | | |
| | Key | XXRXXXXRAIXYXXX | 2323 | | | | |
| P33 | Key | XXXXXXXRAIIYSIX | 2324 | | | | |
| P34 | Preferably | XXXXXXXRAIIYSIX | 2325 | | | | |
| | Key | XXXXXXXRXIXYXIX | 2326 | | | | |
| | Key | RYDALRAII | 2327 | | | | |
| | Key | IIYSI | 2328 | | | | |
| P35 | Key | XXXXXXXRAIIYXIX | 2329 | | | | |
| P53 | Key | AIRAI | 2330 | | | | |
| P55 | Preferably | XXRXXXLRAIIYSIV | 2331 | | | | |
| | Key | XXXXXXXRAIIYXIX | 2332 | | | | |
| G1 | Preferably | XXRXXXXRAIIYXIV | 2333 | | | | |
| | Key | XXXXXXXRAIIYXIV | 2334 | | | | |
| G5 | Preferably | XXRXXXXRAIIYSIV | 2335 | | | | |
| | Key | XXXXXXXRAIIYSIX | 2336 | | | | |
| G6 | Preferably | XXRXXXXRAIIYSIX | 2337 | | | | |
| | Key | XXXXXXXRAIXYXIX | 2338 | | | | |
| | Key | AIIYS | 2339 | | | | |
| G8 | Key | XXXXXXXRAIIYXXX | 2340 | | | | |
| G9 | Key | XXXXXXXRAIIYXIX | 2341 | | | | |

E40
Spot No. 4

| | | | | Food in which | | | |
|---|---|---|---|---|---|---|---|
| | | | SEQ ID | cross-reactivity | Graph | | SEQ ID |
| Protein name | Fructose-bisphosphate aldolase W5CCA9 | | NO | was confirmed | No. | Synthetic sequence | NO |
| 15-residue | HDIDRCAYVTEIVLA (positions 183-197 of | | 2342 | | | | |
| sequences | SEQ ID NO: 8) | | | | | | |
| P9 | Key | XDXXXCXYXXXIVLA | 2343 | | | | |
| | Key | HDIDRCAY | 2344 | | | | |
| | More preferably | YVTEIVL | 2345 | | | | |
| | Preferably | YVTEIV | 2346 | | | | |
| | Key | VTEI | 2347 | | | | |
| P12 | Preferably | XXXXRCAYVTXIVLA | 2348 | | | | |
| | Key | XXXXXCXYXXXIVLA | 2349 | | | | |
| | More preferably | YVTEIVL | 2350 | | | | |
| | Preferably | YVTXIVL | 2351 | | | | |
| | Key | YXXXIVL | 2352 | | | | |
| P14 | More preferably | XXXDRCAYVTXIVLA | 2353 | | | | |
| | Preferably | XXXXXCXYVTXIVLA | 2354 | | | | |
| | Key | XXXXXCXYXXXIVLX | 2355 | | | | |
| | Key | YVTEIV | 2356 | | | | |
| P18 | Key | HDIDRCAY | 2357 | | | | |
| | Key | TEIV | 2358 | | | | |
| P21 | More preferably | XXXDRCXYVTXIVLA | 2359 | | | | |
| | Preferably | XXXXXCXYXTXIVLA | 2360 | | | | |
| | Key | XXXXXXXYXXXIVLX | 2361 | | | | |
| | Key | VTEIV | 2362 | | | | |
| P22 | Key | XXXXXXXYXXXXVLA | 2363 | | | | |
| P24 | More preferably | XXXXXCAYVTXIVLA | 2364 | | | | |
| | Preferably | XXXXXCXYVXXIVLA | 2365 | | | | |
| | Key | XXXXXXXYXXXIVLX | 2366 | | | | |
| | Preferably | VTEIV | 2367 | | | | |
| | Key | VTXIV | 2368 | | | | |
| P26 | Preferably | XXXXXCXYXTXIVLA | 2369 | | | | |
| | Key | XXXXXXXYXTXIVLX | 2370 | | | | |
| | Key | HDIDRCAY | 2371 | | | | |
| | Preferably | TEIVL | 2372 | | | | |
| | Key | TEIV | 2373 | | | | |
| P27 | Preferably | XXXDRCAYXTXIVLA | 2374 | | | | |
| | Key | XXXXXCXYXXXIVLA | 2375 | | | | |
| | Preferably | AYVTEIV | 2376 | | | | |
| | Key | YVTEIV | 2377 | | | | |
| P28 | Key | XXXXXCAYXXXIVLX | 2378 | | | | |
| | Key | HDIDRCAY | 2379 | | | | |
| | Key | DRCAYVTEIV | 2380 | | | | |
| P29 | Preferably | XXXXXCXYXTXIVLA | 2381 | | | | |
| | Key | XXXXXXXYXXXIVLX | 2382 | | | | |
| | Key | HDIDRCAY | 2383 | | | | |
| | Preferably | YVTEIVL | 2384 | | | | |
| | Key | VTEI | 2385 | | | | |
| P32 | Preferably | HXXXXCXYXXXIVLA | 2386 | | | | |
| | Key | XXXXXXXYXXXIVLA | 2387 | | | | |
| | Key | RCAYVTEIV | 2388 | | | | |
| P33 | Key | XXXXRCXYVTXIVLA | 2389 | | | | |
| | Key | VTEIV | 2390 | | | | |
| P34 | Preferably | XDIDRCAYVTXIVLA | 2391 | | | | |
| | Key | XXXXRCXYXXXXVLA | 2392 | | | | |
| | Preferably | PHDLDRCAYV | 2393 | | | | |
| | Key | HDIDRCAYV | 2394 | | | | |
| | Key | TEIV | 2395 | | | | |
| P35 | Preferably | XDXXXCXYXXXIVLA | 2396 | | | | |
| | Key | XXXXXCXYXXXXVLX | 2397 | | | | |
| | Preferably | TEIVL | 2398 | | | | |
| | Key | TEIV | 2399 | | | | |
| P36 | Key | XXXDXCXYXTXIVLA | 2400 | | | | |
| | Preferably | VTEIV | 2401 | | | | |
| | Key | TEIV | 2402 | | | | |
| P50 | Preferably | XDIXRCAYXTXIVLA | 2403 | | | | |
| | Key | XDXXXXXYXXXIVLA | 2404 | | | | |
| | More preferably | RCAYVTEIVL | 2405 | | | | |
| | Preferably | TEIVL | 2406 | | | | |
| | Key | TXIVL | 2407 | | | | |
| P52 | More preferably | HDLDRCAYVTXIVLA | 2408 | | | | |
| | Preferably | XDLDRCAYXXXIVLA | 2409 | | | | |
| | Key | XDIXRCXYXXXIVLX | 2410 | | | | |
| | Preferably | TEIVL | 2411 | | | | |
| | Key | TXIVL | 2412 | | | | |
| G7 | Preferably | XXIXXCXYVXXIVLX | 2413 | | | | |
| | Key | XXIXXXXYXXXXVLX | 2414 | | | | |
| | Preferably | LDRCAYV | 2415 | | | | |
| | Key | IXXCXYV | 2416 | | | | |
| | Preferably | RCAYVTEIVL | 2417 | | | | |
| | Key | TEIVL | 2418 | | | | |

E41
Spot No. 4

| | | | | Food in which | | | |
|---|---|---|---|---|---|---|---|
| | | | SEQ ID | cross-reactivity | Graph | | SEQ ID |
| Protein name | Fructose-bisphosphate aldolase W5CCA9 | | NO | was confirmed | No. | Synthetic sequence | NO |
| 15-residue | QSTLKAWSGKTENEE (positions 293-307 of | | 2419 | | | | |
| sequences | SEQ ID NO: 8) | | | | | | |
| P12 | More preferably | XXTXKXWSGKTXXEX | 2420 | | | | |
| | Preferably | XXXXKXWXGKTXXEX | 2421 | | | | |
| | Key | XXXXXXWXGKTXXEX | 2422 | | | | |
| | More preferably | AWSGKTEN | 2423 | | | | |
| | Preferably | AWSGK | 2424 | | | | |
| | Key | NOWSGK | 2425 | | | | |
| P15 | Key | QSTLKXWSGKTXXXX | 2426 | | | | |
| P22 | Key | XXTLKXWXGKTXXXX | 2427 | | | | |
| P24 | Preferably | QSTXKXWXGKTXXXX | 2428 | | | | |
| | Key | XXTXKXXXXKTXXXX | 2429 | | | | |
| P26 | Preferably | QSTLKAWXXKTXNEX | 2430 | | | | |
| | Key | XXXLKAWXXKTXXXX | 2431 | | | | |
| | More preferably | QSTLKAWSGK | 2432 | | | | |
| | Preferably | QSTLKAWXXK | 2433 | | | | |
| | Key | XXXLKAWXXK | 2434 | | | | |
| | Preferably | KAWSGKTEN | 2435 | | | | |
| | Key | WSGKTE | 2436 | | | | |
| P27 | Key | QSTXKAWSGKTXXXX | 2437 | | | | |
| P28 | More preferably | XXXLKAWSGKTXXXX | 2438 | | | | |
| | Preferably | XXXXKAWSGKTXXXX | 2439 | | | | |
| | Key | XXXXXAWXXKTXXXX | 2440 | | | | |
| | Key | KAWSGK | 2441 | | | | |
| P29 | Key | XXXXKXWSGKTXXXX | 2442 | | | | |
| P32 | More preferably | XSTLKAWSGKTXXXX | 2443 | | | | |
| | Preferably | XXXXKAWSGKTXXXX | 2444 | | | | |
| | Key | XXXXXXWSGKTXXXX | 2445 | | | | |
| P33 | Preferably | XSTLKAWXXKTXXXX | 2446 | | | | |
| | Key | XXXXKXWXXKTXXXX | 2447 | | | | |
| P34 | More preferably | QSTLKAWSGKTXXXX | 2448 | | | | |
| | Preferably | XSXLKAWSGKTXXXX | 2449 | | | | |
| | Key | XXXLKAWXGKTXXXX | 2450 | | | | |
| P35 | Preferably | XSXLKAWSXKTENEX | 2451 | | | | |
| | Key | XXXXKXWXXKTXNXX | 2452 | | | | |
| | Preferably | LKAWSGK | 2453 | | | | |
| | Key | LKAWSXK | 2454 | | | | |
| P36 | Preferably | QSTLKAWSGKTXXXX | 2455 | | | | |
| | Key | QSTLKXWSGKTXXXX | 2456 | | | | |
| P50 | More preferably | XXXLKAWXGKTXNXE | 2457 | | | | |
| | Preferably | XXXLKAWXXKTXNXX | 2458 | | | | |
| | Key | XXXLKAWXXKTXXXX | 2459 | | | | |
| | Further preferably | LKAWSGK | 2460 | | | | |
| | More preferably | LKAWSG | 2461 | | | | |
| | Preferably | LKAWXG | 2462 | | | | |
| | Key | LKAWXX | 2463 | | | | |
| | More preferably | WSGKTENEE | 2464 | | | | |
| | Preferably | WXGKTXNXE | 2465 | | | | |
| | Key | WXXKTXNXX | 2466 | | | | |
| P52 | More preferably | QSTLKXWSGKTEXEE | 2467 | | | | |
| | Preferably | XSTLXXWXXKTEXEX | 2468 | | | | |
| | Key | XSXLXXWXXKTEXXX | 2469 | | | | |
| | Preferably | LKAWSGK | 2470 | | | | |
| | Key | LKXWSGK | 2471 | | | | |
| | More preferably | SGKTENEE | 2472 | | | | |
| | Preferably | SGKTEXEE | 2473 | | | | |
| | Key | XXKTEXEX | 2474 | | | | |
| G1 | Preferably | XSTLKAWSGKTXXXX | 2475 | | | | |
| | Key | XXXXKAWXXKTXXXX | 2476 | | | | |
| G2 | More preferably | XSTXXAWSXKTENEX | 2477 | | | | |
| | Preferably | XSXXXAWSXKTENEX | 2478 | | | | |
| | Key | XXXXXAWSXKTXNXX | 2479 | | | | |
| | Key | KAWSG | 2480 | | | | |
| G5 | More preferably | QSTLKAWSGKTXXXX | 2481 | | | | |
| | Preferably | XXXLKAWSGKTXXXX | 2482 | | | | |
| | Key | XXXXKAWSGKTXXXX | 2483 | | | | |
| G6 | Key | QXXLXXXSGKTXXXX | 2484 | | | | |
| G7 | Preferably | QSTXKXWSGKTENEX | 2485 | | | | |
| | Key | XSXXKXWSXKTENXXX | 2486 | | | | |
| | More preferably | KAWSGK | 2487 | | | | |
| | Preferably | KXWSGK | 2488 | | | | |
| | Key | KXWSXK | 2489 | | | | |
| G9 | Key | XXXLKXWXXKTXXXX | 2490 | | | | |

E42
Spot No. 5

| | | | | Food in which | | | |
|---|---|---|---|---|---|---|---|
| | | | SEQ ID | cross-reactivity | Graph | | SEQ ID |
| Protein name | Alpha-gliadin G12-LM2-12 Q1WA40 | | NO | was confirmed | No. | Synthetic sequence | NO |
| 15-residue | SSQVSFQPSQLNPQA (positions 251-265 of | | 2491 | | | | |
| sequences | SEQ ID NO: 10) | | | | | | |
| P2 | More preferably | SSQVSFQPSQ | 2492 | | | | |
| | Preferably | SSQVSF | 2493 | | | | |
| | Key | QVSF | 2494 | | | | |
| | Key | FQPSQLNPQ | 2495 | | | | |
| P7 | Key | XSQXXFXXXQXXXXX | 2496 | | | | |
| | Key | QVSF | 2497 | | | | |
| P8 | Key | SSQVSFXXXXXXXXX | 2498 | | | | |
| | Preferably | SQVSF | 2499 | | | | |
| | Key | QVSF | 2500 | Wheat/rye/barley | 3 | QVSF | 2926 |
| | Key | SFQPSQLNPQ | 2501 | Wheat | 3 | SFQPSQLNPQ | 2927 |
| P15 | Preferably | SSQVSFQPSQ | 2502 | | | | |
| | Key | SSQVSF | 2503 | | | | |
| P16 | Preferably | SSQVSF | 2504 | | | | |
| | Key | SQVSF | 2505 | | | | |
| P20 | Preferably | SSQVSFQPSQ | 2506 | | | | |
| | Key | SQVSF | 2507 | | | | |
| P22 | Key | SQVSF | 2508 | | | | |
| P29 | Key | QVSF | 2509 | | | | |
| | Key | PSQLNPQ | 2510 | | | | |
| P34 | Key | SSXVSXXXXXXXXXX | 2511 | | | | |
| P36 | Key | SQVSF | 2512 | | | | |
| P51 | Key | SXXXXFXXSXLNXXA | 2513 | | | | |
| | Preferably | SFQPSQLNPQ | 2514 | | | | |
| | Key | SFQPSQ | 2515 | | | | |
| P53 | Key | SSQVSF | 2516 | | | | |
| | More preferably | QVSFQPSQLN | 2517 | | | | |
| | Preferably | PSQLNPQ | 2518 | | | | |
| | Key | PSQLN | 2519 | | | | |
| P56 | More preferably | XXXXXFQXSQLNPQA | 2520 | | | | |
| | Preferably | XXXXXFXXSXXNPQA | 2521 | | | | |
| | Key | XXXXXXXXSXXNXQA | 2522 | | | | |
| | Further preferably | PSQLNPQA | 2523 | | | | |
| | More preferably | PSQLNPQ | 2524 | | | | |
| | Preferably | XSQLNPQ | 2525 | | | | |
| | Key | XSXXNPQ | 2526 | | | | |
| G2 | Key | SSXXXFQXXXXNXXX | 2527 | | | | |
| | Key | SSQVSF | 2528 | | | | |
| | More preferably | FQPSQLNPQ | 2529 | | | | |
| | Preferably | FQPSQLNP | 2530 | | | | |
| | Key | FQPSQLN | 2531 | | | | |
| G3 | Preferably | SSQVSFQPSXLXXQX | 2532 | | | | |
| | Key | XSQXXXXPSXLXXXX | 2533 | | | | |
| | More preferably | SSQVSFQPSQ | 2534 | | | | |
| | Preferably | SSQVSFQPSX | 2535 | | | | |
| | Key | XSQXXXXPSX | 2536 | | | | |
| | More preferably | SFQPSQLNPQ | 2537 | | | | |
| | Preferably | SFQPSXLXXQ | 2538 | | | | |
| | Key | XXXPSXLXXX | 2539 | | | | |
| G7 | Key | XXXVSFXXSXLNPXX | 2540 | | | | |
| | Preferably | SSQVSFQPSQ | 2541 | | | | |
| | Key | SSQVSF | 2542 | | | | |
| | Preferably | VSFQPSQLN | 2543 | | | | |
| | Key | VSFXXSXLN | 2544 | | | | |

E43
Spot No. 1

| | | | | Food in which | | | |
|---|---|---|---|---|---|---|---|
| | | | SEQ ID | cross-reactivity | Graph | | SEQ ID |
| Protein name | Alpha/beta-gliadin MM1 P18573 | | NO | was confirmed | No. | Synthetic sequence | NO |
| 15-residue | LQQSTYQLVQQLCCQ (positions 181-195 of | | 2545 | | | | |
| sequences | SEQ ID NO: 2) | | | | | | |
| P2 | More preferably | LQQSTYQLVQ | 2546 | | | | |
| | Preferably | QSTYQLVQQL | 2547 | | | | |
| | Key | QSTY | 2548 | | | | |
| | Key | QLVQQLCC | 2549 | | | | |
| P7 | Key | LXQSTYXLVXXXXXX | 2550 | | | | |
| | More preferably | YQLVQQLCC | 2551 | | | | |
| | Preferably | QLVQQLCC | 2552 | | | | |
| | Key | QLVQ | 2553 | | | | |
| P20 | Key | LQQSTYQLVQ | 2554 | | | | |
| | Key | QSTYQLVQQL | 2555 | | | | |
| | Key | QLVQQLCC | 2556 | | | | |
| P21 | Key | XXXXTYXLXXXLXXX | 2557 | | | | |
| | Key | QSTYQLVQQL | 2558 | | | | |
| | Key | LVQQLCC | 2559 | | | | |
| P22 | Key | LQQSTYQLVQ | 2560 | | | | |
| | Key | LVQQL | 2561 | | | | |
| P24 | More preferably | QSTYQLVQQL | 2562 | | | | |
| | Preferably | QLVQQLCC | 2563 | | | | |
| | Key | QLVQQ | 2564 | | | | |
| P25 | Key | QSTYQLVQ | 2565 | | | | |
| | Key | YQLVQQLCC | 2566 | | | | |
| P26 | Key | QLVQQ | 2567 | | | | |
| P27 | Key | XXXSTYQLVXXLXCX | 2568 | | | | |
| | Preferably | QLVQQL | 2569 | | | | |
| | Key | QLVQQ | 2570 | | | | |
| P28 | Preferably | XQQSTYQLVXXLXCX | 2571 | | | | |
| | Key | XXXSXYQLVXXXXXX | 2572 | | | | |
| | More preferably | YQLVQQL | 2573 | | | | |
| | Preferably | QLVQQL | 2574 | | | | |
| | Key | QLVQ | 2575 | | | | |
| P29 | Preferably | XXXSTYQLXXXXXCX | 2576 | | | | |
| | Key | XXXSTYQLXXXXXXX | 2577 | | | | |
| | Key | YQLVQQL | 2578 | | | | |
| P30 | Key | YQLVQQ | 2579 | | | | |
| P31 | Preferably | XQXSTYQLVXXXXCX | 2580 | | | | |
| | Key | XXXXTYXLVXXXXXX | 2581 | | | | |
| | More preferably | YQLVQQL | 2582 | | | | |
| | Preferably | QLVQQ | 2583 | | | | |
| | Key | QLVQ | 2584 | | | | |
| P32 | Preferably | LQQSTYQLVQ | 2585 | | | | |
| | Key | LQQSTYQL | 2586 | | | | |
| | Preferably | QLVQQLCC | 2587 | | | | |
| | Key | QQLC | 2588 | | | | |
| P34 | More preferably | QSTYQLVQQL | 2589 | | | | |
| | Preferably | QLVQQLCC | 2590 | | | | |
| | Key | QLVQQL | 2591 | | | | |
| P35 | Preferably | YQLVQQ | 2592 | | | | |
| | Key | QLVQ | 2593 | | | | |
| P36 | Preferably | QLVQQL | 2594 | | | | |
| | Key | VQQL | 2595 | | | | |
| P53 | Key | XXXSXYXXXXXLXCX | 2596 | | | | |
| | Key | QQSTYQLV | 2597 | | | | |
| | More preferably | YQLVQQLCC | 2598 | | | | |
| | Preferably | QLVQQLCC | 2599 | | | | |
| | Key | QQLC | 2600 | | | | |
| | Preferably | QQSTYQLVQ | 2601 | | | | |
| P54 | Key | QQSTYQLV | 2602 | | | | |
| | Key | QLVQQLC | 2603 | | | | |
| | Preferably | YQLVQ | 2604 | | | | |
| G3 | Key | QLVQ | 2605 | | | | |
| G5 | Key | QLVQQL | 2606 | | | | |
| G6 | Key | LQQSTYQLVQ | 2607 | | | | |
| | Key | QLVQQL | 2608 | | | | |
| G7 | Key | QLVQQLCC | 2609 | | | | |
| G9 | Key | LQQSTYQLV | 2610 | | | | |
| | Key | QSTYQLVQQL | 2611 | | | | |
| | Key | QLVQQLCC | 2612 | | | | |

E44
Spot No. 11, 12

| | | | | Food in which | | | |
|---|---|---|---|---|---|---|---|
| | | | SEQ ID | cross-reactivity | Graph | | SEQ ID |
| Protein name | Globulin 3 B7U6L4 | | NO | was confirmed | No. | Synthetic sequence | NO |
| 15-residue | SAKPLLASLSKRVLT (positions 261-275 of | | 2613 | | | | |
| sequences | SEQ ID NO: 22) | | | | | | |
| P2 | Key | AKPLL | 2614 | | | | |
| | Key | SLSKRV | 2615 | | | | |
| P24 | Key | AKPLL | 2616 | | | | |
| | Key | SKRV | 2617 | | | | |
| P32 | Key | XXXXXLASLSKXXLX | 2618 | | | | |
| | Key | LASLSK | 2619 | | | | |
| G2 | Key | XXXXXXXXLSXRXLX | 2620 | | | | |
| | Key | LLAS | 2621 | | | | |
| G3 | Key | SXXXXLAXXXXXVLX | 2622 | | | | |
| | Preferably | SAKPLL | 2623 | | | | |
| | Key | AKPLL | 2624 | | | | |
| | Preferably | ASLSKRV | 2625 | | | | |
| | Key | LSKRV | 2626 | | | | |
| G7 | Key | LLASLSKRV | 2627 | | | | |
| G9 | Preferably | XXXXLLASLSKXXXX | 2628 | | | | |
| | Key | XXXXLLAXLSKXXXX | 2629 | | | | |
| | Key | LASLSK | 2630 | | | | |

E45
Spot No. 13

| | | | | Food in which | | | |
|---|---|---|---|---|---|---|---|
| | | | SEQ ID | cross-reactivity | Graph | | SEQ ID |
| Protein name | Elongation factor 1-alpha Q03033 | | NO | was confirmed | No. | Synthetic sequence | NO |
| 15-residue | RFEKEAAEMNKRSFK (positions 41-45 of | | 2631 | | | | |
| sequences | SEQ ID NO: 24) | | | | | | |
| P7 | Key | XXXKXXAEMXXXXXX | 2632 | | | | |
| | Preferably | KEAAEM | 2633 | | | | |
| | Key | EAAE | 2634 | | | | |
| P10 | Preferably | XXXKEXAEMNXXXXX | 2635 | | | | |
| | Key | XXXKEXAEMXXXXXX | 2636 | | | | |
| | Preferably | KEAAEM | 2637 | | | | |
| | Key | EAAE | 2638 | | | | |
| P14 | Key | XXXKXXXXXNKRXXX | 2639 | | | | |
| | Preferably | RFEKEAAEMN | 2640 | | | | |
| | Key | KEAAEM | 2641 | | | | |
| P16 | Key | KEAAEM | 2642 | | | | |
| P20 | Preferably | KEAAEMN | 2643 | | | | |
| | Key | KEXAEXN | 2644 | | | | |
| P22 | Key | XXXKEXAEXNKRXXX | 2645 | | | | |
| | Key | KEAAEMN | 2646 | | | | |
| P26 | Key | KEAAEM | 2647 | | | | |
| | Key | NKRSFK | 2648 | | | | |
| P29 | Preferably | KEAAE | 2649 | | | | |
| | Key | KEXAE | 2650 | | | | |
| P31 | Key | RXEKEXAEMXXXXXX | 2651 | | | | |
| | Preferably | KEAAEM | 2652 | | | | |
| | Key | EAAE | 2653 | | | | |
| P32 | Key | XXXKEAAEMNXXXXX | 2654 | | | | |
| | Preferably | EAAEMNK | 2655 | | | | |
| | Key | EAAEXNX | 2656 | | | | |
| P35 | Key | XXEXXXXXXNKRXXX | 2657 | | | | |
| | Key | FEKEAAE | 2658 | | | | |
| | Preferably | EAAEMNKRSF | 2659 | | | | |
| | Key | EMNKRSF | 2660 | | | | |
| P50 | Preferably | RFEKEAAXXNXRXXK | 2661 | | | | |
| | Key | XFEKXXAXXNXRXXX | 2662 | | | | |
| | Preferably | FEKEAA | 2663 | | | | |
| | Key | FEKEA | 2664 | | | | |
| P57 | Preferably | RFEKEXAEMNXRXFK | 2665 | | | | |
| | Key | XXEKEXAXMXXXXFX | 2666 | | | | |
| | More preferably | RFEKEAAEMN | 2667 | | | | |
| | Preferably | KEAAE | 2668 | | | | |
| | Key | KEXAE | 2669 | | | | |
| G5 | Key | RFEKEXXXXXXXXXX | 2670 | | | | |
| | Key | AEMNKRSFK | 2671 | | | | |
| G7 | Key | RFEKEAAEMN | 2672 | | | | |
| | Key | EAAEMNKR | 2673 | | | | |

E46
Spot No. 13

| | | | | Food in which | | | |
|---|---|---|---|---|---|---|---|
| | | | SEQ ID | cross-reactivity | Graph | | SEQ ID |
| Protein name | Elongation factor 1-alpha Q03033 | | NO | was confirmed | No. | Synthetic sequence | NO |
| 15-residue | YKGPTLLEALDQINE (positions 211-225 of | | 2674 | | | | |
| sequences | SEQ ID NO: 24) | | | | | | |
| P4 | Key | YXXXXLXXXXXQINX | 2675 | | | | |
| P8 | Key | YKGPTL | 2676 | Wheat/barley | 3 | YKGPTL | 2928 |
| P12 | Key | YKGPTL | 2677 | | | | |
| P14 | Key | YXXPXLXXXXXQXXX | 2678 | | | | |
| | Key | YKGPTL | 2679 | | | | |
| P17 | Key | YKGPTL | 2680 | | | | |
| P22 | Key | YKGPTLXXXXXXXXX | 2681 | | | | |
| | Preferably | YKGPTL | 2682 | | | | |
| | Key | KGPTL | 2683 | | | | |
| P26 | Key | YKGPTL | 2684 | | | | |
| P27 | Preferably | YKGPTL | 2685 | | | | |
| | Key | YKXPXL | 2686 | | | | |
| P28 | Key | YKXPXXXXXXXQXNX | 2687 | | | | |
| P29 | Key | YKGPTL | 2688 | | | | |
| P30 | Key | YKGPTL | 2689 | | | | |
| P31 | Preferably | YKGPXXXXALDQXXX | 2690 | | | | |
| | Key | YKXXXXXXALXQXXX | 2691 | | | | |
| P33 | Key | YKGPTL | 2692 | | | | |
| P34 | Key | YKGPTL | 2693 | | | | |
| P35 | Key | YKGPTL | 2694 | | | | |
| P36 | Key | YKGPTL | 2695 | | | | |
| G3 | Key | YKGPTL | 2696 | | | | |
| G6 | Key | YKGPTL | 2697 | | | | |
| G7 | Key | KGPTL | 2698 | | | | |
| G8 | Key | YKGPTL | 2699 | | | | |
| G9 | Key | YKGPTL | 2700 | | | | |

E47
Spot No. 13

| | | | | Food in which | | | |
|---|---|---|---|---|---|---|---|
| | | | SEQ ID | cross-reactivity | Graph | | SEQ ID |
| Protein name | Elongation factor 1-alpha Q03033 | | NO | was confirmed | No. | Synthetic sequence | NO |
| 15-residue | VYKIGGIGTVPVGRV (positions 241-255 of | | 2701 | | | | |
| sequences | SEQ ID NO: 24) | | | | | | |
| P3 | More preferably | YKIGGIGTVP | 2702 | | | | |
| | Preferably | YKIGGIGTV | 2703 | | | | |
| | Key | YKIGGI | 2704 | | | | |
| P8 | More preferably | YKIGGIGTVP | 2705 | | | | |
| | Preferably | YKIGGIGTV | 2706 | | | | |
| | Key | YKIGGIGT | 2707 | Wheat/barley | 3 | YKIGGIGT | 2929 |
| P16 | More preferably | YKIGGIGTV | 2708 | | | | |
| | Preferably | YKIGGIGT | 2709 | | | | |
| | Key | YKIGG | 2710 | | | | |
| P17 | More preferably | YKIGGIGT | 2711 | | | | |
| | Preferably | YKIGG | 2712 | | | | |
| | Key | KIGG | 2713 | | | | |
| | Key | GIGTVPVGRV | 2714 | | | | |
| P18 | More preferably | YKIGGIGTV | 2715 | | | | |
| | Preferably | YKIGGI | 2716 | | | | |
| | Key | YKIGG | 2717 | | | | |
| | Key | GIGTVPVGRV | 2718 | | | | |
| P25 | Key | YKIGG | 2719 | | | | |
| | Preferably | IGGIGTVPVG | 2720 | | | | |
| | Key | GIGTVPVG | 2721 | | | | |
| P26 | Preferably | YKIGG | 2722 | | | | |
| | Key | KIGG | 2723 | | | | |
| | Key | GIGTVPVGRV | 2724 | | | | |
| P27 | Preferably | YKIGG | 2725 | | | | |
| | Key | KIGG | 2726 | | | | |
| | Key | GIGTVPVGR | 2727 | | | | |
| P28 | Key | XYXXXXXXXXXVGRX | 2728 | | | | |
| | More preferably | YKIGGIGTVP | 2729 | | | | |
| | Preferably | YKIGGIGTV | 2730 | | | | |
| | Key | YKIGGI | 2731 | | | | |
| P29 | More preferably | YKIGGIGTVP | 2732 | | | | |
| | Preferably | YKIGGI | 2733 | | | | |
| | Key | YKIGG | 2734 | | | | |
| | Key | GIGTVPVGRV | 2735 | | | | |
| P30 | Preferably | YKIGGIGTVP | 2736 | | | | |
| | Key | KIGG | 2737 | | | | |
| | Key | VPVGR | 2738 | | | | |
| P31 | Preferably | YKIGGIG | 2739 | | | | |
| | Key | KIGGI | 2740 | | | | |
| | Key | GIGTVPVGRV | 2741 | | | | |
| P33 | Preferably | YKIGGIGTVP | 2742 | | | | |
| | Key | YKIGGIGTV | 2743 | | | | |
| P34 | Key | XYKXGXXXXXXVXXX | 2744 | | | | |
| | Preferably | KIGGIG | 2745 | | | | |
| | Key | KIGGI | 2746 | | | | |
| P35 | More preferably | YKIGGIGT | 2747 | | | | |
| | Preferably | YKIGG | 2748 | | | | |
| | Key | KIGG | 2749 | | | | |
| P36 | Preferably | YKIGGIGTV | 2750 | | | | |
| | Key | KIGG | 2751 | | | | |
| P52 | Preferably | YKIGGIGTVP | 2752 | | | | |
| | Key | YKIGGIGTV | 2753 | | | | |
| P53 | More preferably | YKIGGIGTV | 2754 | | | | |
| | Preferably | KIGGIGTV | 2755 | | | | |
| | Key | KIGGIGT | 2756 | | | | |
| P55 | Preferably | YKIGGIGTVP | 2757 | | | | |
| | Key | YKIGGIGTV | 2758 | | | | |
| G3 | Preferably | YKIGGIGTVP | 2759 | | | | |
| | Key | YKIGGIGTV | 2760 | | | | |
| G4 | Preferably | VYKIGGIGTV | 2761 | | | | |
| | Key | YKIGGIGTV | 2762 | | | | |
| G6 | Preferably | YKIGGIGTV | 2763 | | | | |
| | Key | KIGG | 2764 | | | | |
| | Key | VPVGR | 2765 | | | | |
| G7 | Preferably | YKIGGIG | 2766 | | | | |
| | Key | KIGG | 2767 | | | | |
| | Key | VPVGRV | 2768 | | | | |
| G8 | Preferably | YKIGGIGTV | 2769 | | | | |
| | Key | YKIGG | 2770 | | | | |
| G9 | Preferably | YKIGGIG | 2771 | | | | |
| | Key | YKIGG | 2772 | | | | |
| | Key | IGTVPVGRV | 2773 | | | | |

E48
Spot No. 13

| | | | | Food in which | | | |
|---|---|---|---|---|---|---|---|
| | | | SEQ ID | cross-reactivity | Graph | | SEQ ID |
| Protein name | Elongation factor 1-alpha Q03033 | | NO | was confirmed | No. | Synthetic sequence | NO |
| 15-residue | FLKNGDAGIVKMIPT (positions 381-395 of | | 2774 | | | | |
| sequences | SEQ ID NO: 24) | | | | | | |
| P5 | Preferably | KNGDA | 2775 | | | | |
| | Key | KNGD | 2776 | | | | |
| P8 | More preferably | KNGDAGIVKM | 2777 | | | | |
| | Preferably | DAGIVKMLP | 2778 | | | | |
| | Key | AGIVK | 2779 | Wheat/rye/barley | 3 | AGIVK | 2930 |
| P14 | Preferably | LKNGDAG | 2780 | | | | |
| | Key | KNGD | 2781 | | | | |
| P16 | Key | XXXXXXXXXXKMIPT | 2782 | | | | |
| | Preferably | FLKNGDAG | 2783 | | | | |
| | Key | LKNGD | 2784 | | | | |
| P22 | Key | XXXXXXXXXXXMIPT | 2785 | | | | |
| P27 | Key | XXXXXXXGXXKMXPT | 2786 | | | | |
| | Preferably | LKNGD | 2787 | | | | |
| | Key | KNGD | 2788 | | | | |
| P29 | Key | XXXXXXXGXXKMIPT | 2789 | | | | |
| P33 | Key | LKNGDAGIVK | 2790 | | | | |
| | Preferably | VKMIPT | 2791 | | | | |
| | Key | XKMIPT | 2792 | | | | |
| P34 | Preferably | LKNGDAG | 2793 | | | | |
| | Key | KNGD | 2794 | | | | |
| P35 | Preferably | LKNGD | 2795 | | | | |
| | Key | KNGD | 2796 | | | | |
| P36 | Key | LKNGD | 2797 | | | | |
| P50 | Preferably | LKNGD | 2798 | | | | |
| | Key | KNGD | 2799 | | | | |
| P51 | Key | KNGD | 2800 | | | | |
| P53 | Key | KNGD | 2801 | | | | |
| G1 | Key | VKMIPT | 2802 | Wheat/rye/barley | 4 | VKMIPT | 2931 |
| G5 | Preferably | KNGDAG | 2803 | | | | |
| | Key | NGDAG | 2804 | | | | |
| G6 | Key | XXXXXXXXXXKMIPT | 2805 | | | | |
| G7 | Key | VKMIPT | 2806 | | | | |
| G9 | Preferably | KNGDAG | 2807 | | | | |
| | Key | KNGD | 2808 | | | | |

E49
Spot No. 10

| | | | | Food in which | | | |
|---|---|---|---|---|---|---|---|
| | | | SEQ ID | cross-reactivity | Graph | | SEQ ID |
| Protein name | Globulin-1 S allele M8B8C6 | | NO | was confirmed | No. | Synthetic sequence | NO |
| 15-residue | VYSANTHRSKWFRVV (positions 121-135 of | | 2809 | | | | |
| sequences | SEQ ID NO: 20) | | | | | | |
| P16 | Key | XYXXXXXRSXWXXXX | 2810 | | | | |
| | Key | SANTH | 2811 | | | | |
| P22 | Key | XXXXXXXRSKWXXXX | 2812 | | | | |
| P24 | Key | XYXXNXXXSXWXXXX | 2813 | | | | |
| | Key | SANTH | 2814 | | | | |
| P27 | Key | NTHR | 2815 | | | | |
| P31 | Key | XXXXNTHXSXWFRXX | 2816 | | | | |
| | Preferably | SANTHR | 2817 | | | | |
| | Key | SANTH | 2818 | | | | |
| | Key | KWFRV | 2819 | | | | |
| P33 | Key | XYXXNTXRSXWXXXX | 2820 | | | | |
| | Key | SANTH | 2821 | | | | |
| P53 | Key | SANTHR | 2822 | | | | |
| | Key | NTHRSKWFRV | 2823 | | | | |
| P55 | Key | VYSAXXXRXXXXXXX | 2824 | | | | |
| | Preferably | YSANTH | 2825 | | | | |
| | Key | SANT | 2826 | | | | |
| G6 | Key | XXXANTHXXXWFXXX | 2827 | | | | |
| | Preferably | SANTHRSKW | 2828 | | | | |
| | Key | XANTHXXXW | 2829 | | | | |

E50
Spot No. 10

| | | | | Food in which | | | |
|---|---|---|---|---|---|---|---|
| | | | SEQ ID | cross-reactivity | Graph | | SEQ ID |
| Protein name | Globulin-1 S allele M8B8C6 | | NO | was confirmed | No. | Synthetic sequence | NO |
| 15-residue | YIVVEGRDGYFEMAC (positions 291-305 of | | 2830 | | | | |
| sequences | SEQ ID NO: 20) | | | | | | |
| P8 | Key | YXXVXGRDGXFXXXX | 2831 | | | | |
| | Key | YIVVEG | 2832 | Wheat | 3 | YIVVEG | 2932 |
| | Preferably | EGRDGYFEM | 2833 | | | | |
| | Key | XGRDGXFXX | 2834 | | | | |
| P9 | Key | YXVVXGXDGXXXXXX | 2835 | | | | |
| | Key | IVVEG | 2836 | | | | |
| | Key | EGRDGYFEM | 2837 | | | | |
| P21 | Key | IVVEG | 2838 | | | | |
| | Key | EGRDGYFEM | 2839 | | | | |
| P22 | Key | YIVVEXRDXXXXXXX | 2840 | | | | |
| P24 | Key | YXXVEXRDGXFXXXX | 2841 | | | | |
| | Preferably | YIVVEG | 2842 | | | | |
| | Key | IVVEG | 2843 | | | | |
| | Key | EGRDGYFEM | 2844 | | | | |
| P26 | Preferably | YIVVEG | 2845 | | | | |
| | Key | IVVEG | 2846 | | | | |
| | Preferably | EGRDGYFEMA | 2847 | | | | |
| | Key | EGRDGYFEM | 2848 | | | | |
| P27 | Key | YIXVEGRDGYFXXXX | 2849 | | | | |
| | Key | IVVEG | 2850 | | | | |
| | Key | EGRDGYFEM | 2851 | | | | |
| P31 | Key | IVVEG | 2852 | | | | |
| | Key | EGRDGYFEM | 2853 | | | | |
| P32 | Key | YXVVXXRDGXFXXXX | 2854 | | | | |
| P33 | Key | YXXXXXRXGXFXXXX | 2855 | | | | |
| P34 | Key | IVVEG | 2856 | | | | |
| | Key | EGRDGYFEM | 2857 | | | | |
| P35 | Key | YXXXVXGXDXXXXXX | 2858 | | | | |
| P50 | More preferably | YXXXXGRDGYFEMAX | 2859 | | | | |
| | Preferably | YXXXXGRDGYFXMAX | 2860 | | | | |
| | Key | YXXXXGRXGYFXXAX | 2861 | | | | |
| | Key | IVVEG | 2862 | | | | |
| | Key | VEGRDGYFEM | 2863 | | | | |
| P52 | Key | IVVEG | 2864 | | | | |
| | Key | EGRDGYFEM | 2865 | | | | |
| P53 | Key | YXXXXXRXGXFXXXC | 2866 | | | | |
| | Key | YIVVEGRDG | 2867 | | | | |
| | Key | EGRDGYFE | 2868 | | | | |
| P55 | Preferably | YIXVXXRDGXFXXAX | 2869 | | | | |
| | Key | YXXXXXRDGXFXXXX | 2870 | | | | |
| | Key | VVEGR | 2871 | | | | |
| | More preferably | EGRDGYFEMA | 2872 | | | | |
| | Preferably | XXRDGXFXXA | 2873 | | | | |
| | Key | XXRDGXFXXX | 2874 | | | | |
| G6 | Key | VVEG | 2875 | | | | |
| G7 | Key | YIVVEXXXXXFEXXX | 2876 | | | | |
| | Key | VVEG | 2877 | | | | |
| G8 | Key | IVVEG | 2878 | | | | |
| | Key | EGRDGYFEM | 2879 | | | | |

[0266] In Table 2, WDEIA cases in wheat-allergic patients are represented by P2 to P36, children of cases with general immediate type allergy to wheat, which requires no exercise for its development, are represented by P50 to P57, and adults are represented by G1 to G9.

[0267] The present invention provides polypeptides comprising the amino acid sequences defined in (E1) to (E50), which comprise or consist of the amino acid sequences of SEQ ID NOs: 29-2932 (except for SEQ ID NOs: 138, 227, 259, 269, 273, 342, 399 and 2894) described in Table 2 mentioned later as polypeptides comprising an amino acid sequence specifically binding to an IgE antibody from an allergic patient. The polypeptides (E1) to (E50) each have an amino acid sequence (hereinafter also referred to as an “epitope”) binding to an IgE antibody derived from a protein described in “Origin” of Table 2.

[0268] (1) Alpha/beta-gliadin MM1 protein-derived: (E9), (E31), (E11), (E36) and (E43);

[0269] (2) LMW-m glutenin subunit 8 protein-derived: (E2), (E13) and (E21);

[0270] (3) Gamma-gliadin P08453 protein-derived: (E14), (E24), (E5) and (E25);

[0271] (4) Fructose-bisphosphate aldolase protein-derived: (E33), (E20), (E34), (E10), (E15), (E6), (E16), (E40), (E30) and (E41);

[0272] (5) Alpha-gliadin Gli2-LM2-12 protein-derived: (E9), (E31), (E11), (E17), (E7), (E22) and (E42);

[0273] (6) Alpha-gliadin (Fragment) A0A0E3Z522 protein-derived: (E9), (E31), (E11), (E36) and (E35);

[0274] (7) Gamma-gliadin A1 protein-derived: (E4) and (E19);

[0275] (8) Alpha/beta-gliadin I0IT53 protein-derived: (E23) and (E12);

[0276] (9) LMW-D8 (LMW-GS) protein-derived: (E8), (E1), (E18), (E3) and (E39);

[0277] (10) Globulin 1-S allele 1 protein-derived: (E49) and (E50);

[0278] (11) Globulin 3 protein-derived: (E49) and (E50);

[0279] (12) Elongation factor 1-alpha protein-derived: (E38), (E45), (E28), (E26), (E46), (E47), (E27), (E29), (E48) and (E32);

[0280] (13) Alpha-gliadin (Fragment) A0A0E3UR64 protein-derived: (E23), (E11) and (E36); and

[0281] (14) Gamma-gliadin I7KM78 protein-derived.

[0282] The amino acid sequences defined in (E9) and (E31) are the same sequences. The amino acid sequences defined in (E9) and (E31) are present in 3 types of proteins as defined in (1), (5) and (6). The amino acid sequence defined in (E11) is present in 4 types of proteins as defined in (1), (5), (6) and (13). The amino acid sequence defined in (E23) is present in 2 types of proteins as defined in (8) and (13). The amino acid sequence defined in (E36) is present in 3 types of proteins as defined in (1), (6) and (13).

[0283] The epitope antigen of the present invention is not limited and preferably comprises at least one of the following polypeptides:

[0284] (E1) a polypeptide comprising at least one amino acid sequence selected from the amino acid sequences of SEQ ID NOs: 29-130 and 2880;

[0285] (E2) a polypeptide comprising at least one amino acid sequence selected from the amino acid sequences of SEQ ID NOs: 131-137 and 139-190;

[0286] (E3) a polypeptide comprising at least one amino acid sequence selected from the amino acid sequences of SEQ ID NOs: 191-280 (except for 227, 259, 269 and 273) and 2881;

[0287] (E4) a polypeptide comprising at least one amino acid sequence selected from the amino acid sequences of SEQ ID NOs: 281-341 and 343-345;

[0288] (E5) a polypeptide comprising at least one amino acid sequence selected from the amino acid sequences of SEQ ID NOs: 346-398, 400-413 and 2882;

[0289] (E6) a polypeptide comprising at least one amino acid sequence selected from the amino acid sequences of SEQ ID NOs: 414-492, 2883 and 2884;

[0290] (E7) a polypeptide comprising at least one amino acid sequence selected from the amino acid sequences of SEQ ID NOs: 493-561;

[0291] (E8) a polypeptide comprising at least one amino acid sequence selected from the amino acid sequences of SEQ ID NOs: 562-639;

[0292] (E9) a polypeptide comprising at least one amino acid sequence selected from the amino acid sequences of SEQ ID NOs: 640-705 and 2885-2888;

[0293] (E10) a polypeptide comprising at least one amino acid sequence selected from the amino acid sequences of SEQ ID NOs: 706-775 and 2889-2891;

[0294] (E11) a polypeptide comprising at least one amino acid sequence selected from the amino acid sequences of SEQ ID NOs: 776-898 and 2892;

[0295] (E12) a polypeptide comprising at least one amino acid sequence selected from the amino acid sequences of SEQ ID NOs: 899-973, 2893 and 2895;

[0296] (E13) a polypeptide comprising at least one amino acid sequence selected from the amino acid sequences of SEQ ID NOs: 974-1009;

[0297] (E14) a polypeptide comprising at least one amino acid sequence selected from the amino acid sequences of SEQ ID NOs: 1010-1088 and 2896-2899;

[0298] (E15) a polypeptide comprising at least one amino acid sequence selected from the amino acid sequences of SEQ ID NOs: 1089-1141;

[0299] (E16) a polypeptide comprising at least one amino acid sequence selected from the amino acid sequences of SEQ ID NOs: 1142-1165 and 2900;

[0300] (E17) a polypeptide comprising at least one amino acid sequence selected from the amino acid sequences of SEQ ID NOs: 1166-1208;

[0301] (E18) a polypeptide comprising at least one amino acid sequence selected from the amino acid sequences of SEQ ID NOs: 1209-1256;

[0302] (E19) a polypeptide comprising at least one amino acid sequence selected from the amino acid sequences of SEQ ID NOs: 1257-1296;

[0303] (E20) a polypeptide comprising at least one amino acid sequence selected from the amino acid sequences of SEQ ID NOs: 1297-1366;

[0304] (E21) a polypeptide comprising at least one amino acid sequence selected from the amino acid sequences of SEQ ID NOs: 1367-1402;

[0305] (E22) a polypeptide comprising at least one amino acid sequence selected from the amino acid sequences of SEQ ID NOs: 1403-1507;

[0306] (E23) a polypeptide comprising at least one amino acid sequence selected from the amino acid sequences of SEQ ID NOs: 1508-1565 and 2901;

[0307] (E24) a polypeptide comprising at least one amino acid sequence selected from the amino acid sequences of SEQ ID NOs: 1566-1597;

[0308] (E25) a polypeptide comprising at least one amino acid sequence selected from the amino acid sequences of SEQ ID NOs: 1598-1607;

[0309] (E26) a polypeptide comprising at least one amino acid sequence selected from the amino acid sequences of SEQ ID NOs: 1608-1684, 2902 and 2903;

[0310] (E27) a polypeptide comprising at least one amino acid sequence selected from the amino acid sequences of SEQ ID NOs: 1685-1752, 2904 and 2905;

[0311] (E28) a polypeptide comprising at least one amino acid sequence selected from the amino acid sequences of SEQ ID NOs: 1753-1788, 2906 and 2907;

[0312] (E29) a polypeptide comprising at least one amino acid sequence selected from the amino acid sequences of SEQ ID NOs: 1789-1835, 2908 and 2909;

[0313] (E30) a polypeptide comprising at least one amino acid sequence selected from the amino acid sequences of SEQ ID NOs: 1836-1894, 2910 and 2911;

[0314] (E31) a polypeptide comprising at least one amino acid sequence selected from the amino acid sequences of SEQ ID NOs: 1895-1976, 2912 and 2913;

[0315] (E32) a polypeptide comprising at least one amino acid sequence selected from the amino acid sequences of SEQ ID NOs: 1977-2003;

[0316] (E33) a polypeptide comprising at least one amino acid sequence selected from the amino acid sequences of SEQ ID NOs: 2004-2026;

[0317] (E34) a polypeptide comprising at least one amino acid sequence selected from the amino acid sequences of SEQ ID NOs: 2027-2067 and 2914;

[0318] (E35) a polypeptide comprising at least one amino acid sequence selected from the amino acid sequences of SEQ ID NOs: 2068-2153, 2915 and 2916;

[0319] (E36) a polypeptide comprising at least one amino acid sequence selected from the amino acid sequences of SEQ ID NOs: 2154-2216;

[0320] (E37) a polypeptide comprising at least one amino acid sequence selected from the amino acid sequences of SEQ ID NOs: 2217-2264 and 2917-2921;

[0321] (E38) a polypeptide comprising at least one amino acid sequence selected from the amino acid sequences of SEQ ID NOs: 2265-2308 and 2922-2925;

[0322] (E39) a polypeptide comprising at least one amino acid sequence selected from the amino acid sequences of SEQ ID NOs: 2309-2341;

[0323] (E40) a polypeptide comprising at least one amino acid sequence selected from the amino acid sequences of SEQ ID NOs: 2342-2418;

[0324] (E41) a polypeptide comprising at least one amino acid sequence selected from the amino acid sequences of SEQ ID NOs: 2419-2490;

[0325] (E42) a polypeptide comprising at least one amino acid sequence selected from the amino acid sequences of SEQ ID NOs: 2491-2544, 2926 and 2927;

[0326] (E43) a polypeptide comprising at least one amino acid sequence selected from the amino acid sequences of SEQ ID NOs: 2545-2612;

[0327] (E44) a polypeptide comprising at least one amino acid sequence selected from the amino acid sequences of SEQ ID NOs: 2613-2630;

[0328] (E45) a polypeptide comprising at least one amino acid sequence selected from the amino acid sequences of SEQ ID NOs: 2631-2673;

[0329] (E46) a polypeptide comprising at least one amino acid sequence selected from the amino acid sequences of SEQ ID NOs: 2674-2700 and 2928;

[0330] (E47) a polypeptide comprising at least one amino acid sequence selected from the amino acid sequences of SEQ ID NOs: 2701-2773 and 2929;

[0331] (E48) a polypeptide comprising at least one amino acid sequence selected from the amino acid sequences of SEQ ID NOs: 2774-2808, 2930 and 2931;

[0332] (E49) a polypeptide comprising at least one amino acid sequence selected from the amino acid sequences of SEQ ID NOs: 2809-2829; and

[0333] (E50) a polypeptide comprising at least one amino acid sequence selected from the amino acid sequences of SEQ ID NOs: 2830-2879 and 2932.

[0334] As described in Table 2, the polypeptides (E1) to (E50) mentioned above as a preferred embodiment have a specific sequence identified as an epitope binding to an IgE antibody in Examples herein. The epitope antigen of the present invention may include variants described below, etc., in addition to the aforementioned polypeptides (E1) to (E50) according to a preferred embodiment. Hereinafter, the forms (variants) that may be included in the epitope antigen of the present invention will be described.

[0335] 50 types of sequences, i.e., SEQ ID NOs: 29, 131, 191, 281, 346, 414, 493, 562, 640, 706, 776, 899, 974, 1010, 1089, 1142, 1166, 1209, 1257, 1297, 1367, 1403, 1508, 1566, 1598, 1608, 1685, 1753, 1789, 1836, 1895, 1977, 2004, 2027, 2068, 2154, 2217, 2265, 2309, 2342, 2419, 2491, 2545, 2613, 2631, 2674, 2701, 2774, 2809 and 2830, described in “Common 15-residue sequence” of Table 2 are common sequences of 15 amino acid residues identified as epitopes binding to IgE antibodies for the epitopes of the polypeptides (E1) to (E50) by epitope mapping based on overlapping. In one embodiment, the present invention provides polypeptides comprising these amino acid sequences or consisting of these amino acid sequences. The epitope sequence contained in the polypeptide of the present invention can be all the 15 amino acid residues of this common epitope, or a portion thereof. The epitope sequence is of at least 4 amino acid residues, at least 5 amino acid residues, at least 6 amino acid residues, at least 7 amino acid residues, at least 8 amino acid residues, at least 9 amino acid residues, at least 10 amino acid residues, at least 11 amino acid residues, at least 12 amino acid residues, at least 13 amino acid residues or at least 14 amino acid residues.

[0336] In Examples herein, polypeptides consisting of 4 amino acid residues (e.g., SEQ ID NOs: 30, 58, 61, 222, 238 and 345) were confirmed as epitopes binding to IgE antibodies in many samples. Moreover, the binding activity of polypeptides of 5 or more amino acid residues against IgE antibodies was also confirmed in many samples. Accordingly, the presence of at least 4 amino acid residues is useful as an epitope sequence.

[0337] In one embodiment, variants of the polypeptide of the present invention include polypeptides comprising at least 4 amino acid residues of each of the specific amino acid sequences defined in (E1) to (E50). For example, variants of the polypeptide comprising the amino acid sequence (E1) may include “polypeptides comprising at least 4 amino acid residues in at least one of the amino acid sequences of SEQ ID NOs: 29-130 and 2880”. Preferably, such variants comprise at least 4 amino acid residues, at least 5 amino acid residues, at least 6 amino acid residues, at least 7 amino acid residues, at least 8 amino acid residues, at least 9 amino acid residues, at least 10 amino acid residues, at least 11 amino acid residues, at least 12 amino acid residues, at least 13 amino acid residues, or at least 14 amino acid residues in at least one of the amino acid sequences of SEQ ID NOs: 29-130 and 2880. The same holds true for the amino acid sequences defined in (E2) to (E50).

[0338] In one embodiment, variants of each polypeptide of the present invention are not limited and comprise amino acid residues described below.

[0339] E1: at least 4 amino acid residues of ILWYH;

[0340] E2: at least 4 amino acid residues of FPQQHQQ;

[0341] E3: at least 4 amino acid residues of QQPFP;

[0342] E5: at least 4 amino acid residues of QSFPQ, and/or at least 4 amino acid residues of RPFIQ;

[0343] E6: at least 4 amino acid residues of WRAVL, at least 4 amino acid residues of KIGAT, and/or at least 4 amino acid residues of ATEPS;

[0344] E9: at least 4 amino acid residues of VPLVQ;

[0345] E10: at least 4 amino acid residues of ILFEE, and/or at least 4 amino acid residues of QSTKG;

[0346] E13: at least 4 amino acid residues of IIILQ;

[0347] E14: at least 4 amino acid residues of VPQLQ;

[0348] E15: at least 4 amino acid residues of TKGGK, and/or at least 4 amino acid residues of KPFVDI;

[0349] E16: at least 4 amino acid residues of TEPSQL, and/or at least 4 amino acid residues of SIDQN;

[0350] E17: at least 4 amino acid residues of PGQQQQ;

[0351] E18: at least 4 amino acid residues of PIQQQP;

[0352] E19: at least 4 amino acid residues of SMILPRSDCKV;

[0353] E20: at least 4 amino acid residues of INVEN, and/or at least 4 amino acid residues of VEDNRR;

[0354] E21: at least 4 amino acid residues of KPWQQ;

[0355] E22: at least 4 amino acid residues of YLQPQQP, and/or at least 4 amino acid residues of SQQQA;

[0356] E23: at least 4 amino acid residues of VQQQ, and/or at least 4 amino acid residues of GQQQ;

[0357] E24: at least 4 amino acid residues of PFPQT;

[0358] E25: at least 4 amino acid residues of AQLEAIRS;

[0359] E26: at least 4 amino acid residues of YNPDKV, and/or at least 4 amino acid residues of FVPISG;

[0360] E27: at least 4 amino acid residues of KEAANF, and/or at least 4 amino acid residues of SQVIIM;

[0361] E28: at least 4 amino acid residues of SYLKK, and/or at least 4 amino acid residues of KVGYNP;

[0362] E29: at least 4 amino acid residues of SGKELE, and/or at least 4 amino acid residues of LPKFLKN;

[0363] E30: at least 4 amino acid residues of YTVRTLQRT;

[0364] E31: at least 4 amino acid residues of QVPLV;

[0365] E32: at least 4 amino acid residues of PTGAK, at least 4 amino acid residues of AKVTK, and/or at least 4 amino acid residues of AAIK;

[0366] E33: at least 4 amino acid residues of TGTIG, and/or at least 4 amino acid residues of KRFAS;

[0367] E34: at least 4 amino acid residues of PGALQ, and/or at least 4 amino acid residues of YLSGVIL;

[0368] E35: at least 4 amino acid residues of CTIAP, and/or at least 4 amino acid residues of PFGIFG;

[0369] E36: at least 4 amino acid residues of YSQPQQ, at least 4 amino acid residues of PISQ, and/or at least 4 amino acid residues of SQQQ;

[0370] E37: at least 4 amino acid residues of SRLLR, and/or at least 4 amino acid residues of IRNYRV;

[0371] E38: at least 4 amino acid residues of GIDKR, and/or at least 4 amino acid residues of ERFEK;

[0372] E39: at least 4 amino acid residues of RAIIY;

[0373] E40: at least 4 amino acid residues of HDIDR, and/or at least 4 amino acid residues of VTEIV;

[0374] E41: at least 4 amino acid residues of KAWSGKT;

[0375] E42: at least 4 amino acid residues of SQVSF, and/or at least 4 amino acid residues of FQPSQL;

[0376] E43: at least 4 amino acid residues of QLVQQ, and/or at least 4 amino acid residues of QQLCC;

[0377] E44: at least 4 amino acid residues of LASL, and/or at least 4 amino acid residues of SKRV;

[0378] E45: at least 4 amino acid residues of KEAAE, and/or at least 4 amino acid residues of NKRS;

[0379] E46: at least 4 amino acid residues of KGPTL;

[0380] E47: at least 4 amino acid residues of YKIGG, and/or at least 4 amino acid residues of PVGRV;

[0381] E48: at least 4 amino acid residues of KNGD, and/or at least 4 amino acid residues of KMIPT;

[0382] E49: at least 4 amino acid residues of SANTH, and/or at least 4 amino acid residues of RSKW; and

[0383] E50: at least 4 amino acid residues of IVVEG, and/or at least 4 amino acid residues of GRDGY.

[0384] As shown in Table 2, the aforementioned sequences were found as sequences common in a plurality of sequences as to the specific sequences of each epitope binding to IgE antibodies in Examples.

[0385] In Table 2, the “preferred” sequence is a shorter partial sequence capable of functioning as an epitope in “Common 15-residue sequence”. The “more preferred” sequence is a sequence more preferable than the aforementioned shorter partial sequence for improving binding activity against IgE antibodies. The “key” sequence represents a sequence deemed to be particularly important in “Common 15-residue sequence” or “key” sequence. The amino acid sequence of “X” in the sequence of “key” is an amino acid residue confirmed to have binding activity against IgE antibodies that remains even after exchange to any given alanine (glycine when the original amino acid residue is alanine) in alanine/glycine scanning. Accordingly, X is any given amino acid residue, preferably alanine (or glycine). The sequence of “key” comprising no sequence of “X” was not found to have the amino acid residue confirmed to have binding activity against IgE antibodies that remains in alanine/glycine scanning

[0386] As for the epitopes described in Table 2, the amino acid residue of X is an amino acid residue confirmed to have binding activity against IgE antibodies that remains even after change. In the present invention, preferably, one or more amino acid residues of X in the “key sequence” corresponding to each “preferred sequence” may be substituted by any given amino acid residue. In one embodiment, for example, in SEQ ID NO: 29 which is a preferred sequence, the corresponding key sequence is a plurality of sequences including SEQ ID NOs: 30 and 33. Hereinafter, the same holds true for other “preferred sequences” and “key sequences” of the polypeptide (E1), and the polypeptides (E2) to (E50).

[0387] The number of amino acid residues that may be substituted is not limited and is preferably no more than 6, no more than 5, no more than 4, no more than 3, no more than 2 or no more than 1. Hereinafter, the same holds true for the polypeptides (E2) to (E50).

[0388] Each sequence described in the right column “Synthetic sequence” and/or “SEQ ID NO” of graph No. of Table 2 is a sequence confirmed to have epitope cross-reaction in Example 5. “Confirmed to have epitope cross-reactivity” means that an IgE antibody in the serum of each allergic patient exhibits binding activity higher than (specifically, larger than “1” in FIGS. 7 to 12) that of an IgE antibody in the serum of a nonallergic subject. Accordingly, in one embodiment, the polypeptide of the present invention includes polypeptides comprising these amino acid sequences or consisting of these amino acid sequences. In one embodiment, the IgE antibody in the serum of each allergic patient exhibits at least 1.05 times, at least 1.10 times, at least 1.15 times, at least 1.20 times or at least 1.25 times higher than the binding activity of an IgE antibody in the serum of a nonallergic subject against the polypeptide of the present invention.

[0389] As referred to herein, in a preferred embodiment, the “polypeptides comprising the amino acid sequences defined in (E1) to (E50)” include a polypeptide comprising each amino acid sequence of the aforementioned polypeptides (E1) to (E50) or consisting of each amino acid sequence thereof, and any form (variant) in which amino acid residues are substituted as mentioned above. “Comprising each amino acid sequence of SEQ ID NO: xx” means that the amino acid sequence may additionally comprise any given amino acid sequence without influencing the binding between each amino acid sequence of SEQ ID NO: (including their aforementioned substituted forms) and an IgE antibody (i.e., their functions as an epitope).

[0390] Amino acid residues other than the specifically defined amino acid sequences in the polypeptides may be arbitrarily selected without influencing binding to IgE antibodies (i.e., their functions as epitopes). It is desirable to appropriately select these amino acid residues, preferably, from the sequences of their respective original epitopes or the sequences of their respective original proteins, though the amino acid residues are not limited thereto. For example, SEQ ID NO: 30 is defined only by “QPIQ”, and if other amino acid residues are added thereto, it is desirable to appropriately select the amino acid residues from the original sequence of SEQ ID NO: 29. Further, for the sequences described as (E1) in Table 2-1, it is desirable to add amino acid residues of a sequence derived from the original protein as defined in (9) (corresponding to spot (9)).

[0391] The polypeptides comprising the amino acid sequences defined above in (E1) to (E50) may be prepared by a technique of chemical synthesis such as solid-phase peptide synthesis. Alternatively, polypeptides comprising an epitope may be obtained by expressing them as recombinant polypeptides using a genetic recombination technique well known to those skilled in the art and by separating and purifying them using protein purification methods well known to those skilled in the art. Two or more of the polypeptides may be joined together in combination, or repeats of one epitope may be joined together. In this case, the binding activity against Ig antibodies is generally improved.

[0392] The lengths of the polypeptides comprising the amino acid sequences defined above in (E1) to (E50) are not particularly limited. In a preferred embodiment, the lengths of the polypeptides comprising the amino acid sequences defined above in (E1) to (E50) can be no more than 500 amino acids, no more than 300 amino acids, no more than 200 amino acids, no more than 100 amino acids, no more than 50 amino acids, no more than 30 amino acids, no more than 20 amino acids, no more than 15 amino acids, no more than 10 amino acids, or no more than 5 amino acids. In the case of a polypeptide in which repeats of one or more of the amino acid sequences defined above in (E1) to (E50) are joined together, the length of such an amino acid sequence moiety in a preferred embodiment may be no more than 1000 amino acids, no more than 750 amino acids, no more than 500 amino acids, no more than 250 amino acids, no more than 100 amino acids, no more than 75 amino acids, no more than 50 amino acids, no more than 30 amino acids, no more than 15 amino acids, no more than 10 amino acids or no more than 5 amino acids. The number of amino acid residues described in the preferred embodiments as the lengths of the aforementioned polypeptides is the total length of sequences flanking a spacer (excluding the spacer).

[0393] Preferably, the antigen of the present invention specifically binds to an IgE antibody from an allergic patient.

[0394] Diagnosis Kit and Method (2)

[0395] The present invention provides a method for providing an indicator for diagnosing an allergy in a subject, the method comprising the steps of:

[0396] (i) contacting a sample obtained from the subject with an antigen, wherein the sample is a solution comprising an IgE antibody;

[0397] (ii) detecting binding between the IgE antibody present in the sample obtained from the subject and the antigen; and

[0398] (iii) when the binding between the IgE antibody in the subject and the antigen is detected, an indicator of the fact that the subject is allergic is provided; wherein the antigen is a polypeptide which is at least one of the polypeptides comprising the amino acid sequences defined above in (E1) to (E50), or a polypeptide in which two or more of the polypeptides comprising the amino acid sequences defined above in (E1) to (E50) are joined together via or without a spacer.

[0399] Hereinafter, the polypeptide which is at least one of the polypeptides comprising the amino acid sequences defined above in (E1) to (E50), or the polypeptide in which two or more of the polypeptides comprising the amino acid sequences defined above in (E1) to (E50) are joined together via or without a spacer is also referred to as the “antigen including (E1) to (E50)” in the present specification. The type of the spacer is not particularly limited, and an ordinary spacer that is used by those skilled in the art for joining together two or more peptides can be used. The spacer may be, for example, a hydrocarbon chain such as Acp(6)-OH, or a polypeptide such as an amino acid chain.

[0400] In the case of joining together the polypeptides comprising the amino acid sequences defined above in (E1) to (E50) via or without a spacer, the number of polypeptides to be joined together is not particularly limited. In one embodiment, the number of polypeptides to be joined together is at least 2, at least 3, at least 4, at least 5, at least 6, at least 8, at least 10 or at least 15. In one embodiment, the number of polypeptides to be joined together is no more than 30, no more than 20, no more than 15, no more than 10, no more than 8, no more than 6, no more than 5, no more than 3 or no more than 2.

[0401] The same or different repeats of the polypeptides comprising the amino acid sequences defined above in (E1) to (E50) may be joined together. In such a case of joining together two or more of the polypeptides comprising the amino acid sequences defined above in (E1) to (E50), the polypeptide of the present invention can also be applied to the method, the kit or the composition of the present invention.

[0402] The sample obtained from a subject is as described above in the subsection titled “Diagnosis kit and method (1)”.

[0403] Detection of contact and binding between the sample obtained from a subject and the polypeptide can be carried out by using a known method described above in the subsection titled “Diagnosis kit and method (1)”, such as ELISA (Enzyme-Linked Immunosorbent Assay), sandwich immunoassay, immunoblotting, immunoprecipitation, or immunochromatography.

[0404] The polypeptides comprising the amino acid sequences defined above in (E1) to (E50) may be provided in a state immobilized on a carrier. In this case, the steps (i) and (ii) mentioned above can be carried out using ELISA, sandwich immunoassay, immunochromatography, surface plasmon resonance, or the like. The step (i) mentioned above can be carried out by contacting the sample obtained from a subject with a surface on which the polypeptides comprising the amino acid sequences defined above in (E1) to (E50) are immobilized. The IgE antibody from the subject may be used in a state immobilized on a carrier, and binding to the polypeptides comprising the amino acid sequences defined above in (E1) to (E50) may be detected by the aforementioned technique. In order to establish binding to a carrier or a space from the carrier, or to facilitate contact of a polypeptide with an antibody, a spacer or a tag such as biotin may be added to the N terminus or C terminus of the polypeptide. In the case of binding to biotin, the carrier preferably has avidin.

[0405] The polypeptides comprising the amino acid sequences defined above in (E1) to (E50) may be in a state unimmobilized on a carrier. In this case, flow cytometry or the like can be used in the aforementioned steps (i) and (ii), and the presence of IgE antibody-bound polypeptides comprising the amino acid sequences defined above in (E1) to (E50) can be confirmed with laser beam. Examples of this method include a basophil activation test (BAT) which is a method in which a surface antigen CD203c that appears when basophils are activated by the contact of the polypeptides comprising the amino acid sequences defined above in (E1) to (E50) is detected. Another example includes a histamine release test (HRT) which examines whether histamine is released by further contacting the polypeptides comprising the amino acid sequences defined above in (E1) to (E50) with blood cells in a sample.

[0406] The polypeptides comprising the amino acid sequences defined above in (E1) to (E50) are antigens that specifically bind to IgE antibodies from allergic patients. Therefore, when binding between an IgE antibody from a subject and the antigen is detected, an indicator of the fact that the subject is allergic, also including cross-reactivity, is provided. In order to facilitate the synthesis of the polypeptides comprising the amino acid sequences defined above in (E1) to (E50) using, for example, E. coli, sequences may be added so as to flank the epitope to increase the sequence length. In such a case, when binding between an IgE antibody from a subject and the amino acid sequences defined above in (E1) to (E50) is detected, an indicator of the fact that the subject is allergic, also including cross-reactivity, is also provided. Therefore, any sequence may be added so as to flank the amino acid sequences defined above in (E1) to (E50) which are epitopes.

[0407] The present invention further provides a kit for diagnosing an allergy, comprising at least one of polypeptide comprising the amino acid sequences defined above in (E1) to (E50). The diagnosis kit of this invention may be used in the aforementioned method for providing an indicator for diagnosing an allergy or in a diagnosis method as described later. The diagnosis kit of this invention may comprise not only the at least one of polypeptide comprising the amino acid sequences defined above in (E1) to (E50), but also an anti-IgE antibody labeled with an enzyme and a chromogenic or luminescent substrate serving as a substrate for the enzyme. Also, a fluorescent-labeled anti-IgE antibody may be used. In the diagnosis kit of this invention, the polypeptide comprising the amino acid sequences defined above in (E1) to (E50) may be provided in a state immobilized on a carrier. The diagnosis kit of this invention may also be provided together with instructions on the procedure for diagnosis or a package containing said instructions.

[0408] In another embodiment, the aforementioned diagnosis kit comprises a companion diagnostic agent for an allergy. The companion diagnostic agent is used for identifying patients expected to respond to pharmaceutical products or identifying patients having the risk of severe adverse reactions to pharmaceutical products, or for studying the reactivity of pharmaceutical products in order to optimize treatment using the pharmaceutical products. Here, the optimization of treatment includes, for example, determination of dosage and administration, judgment regarding discontinuation of administration, and confirmation of an allergen component that is used to cause immunological tolerance.

[0409] The present invention further provides a composition for diagnosing an allergy, comprising at least one of polypeptide comprising the amino acid sequences defined above in (E1) to (E50). The diagnosis composition of this invention can be used in a diagnosis method as described below. The diagnosis composition of this invention may further comprise a pharmaceutically acceptable carrier and/or additives commonly used with the polypeptide of this invention depending on the need.

[0410] In one embodiment, the present invention provides a method for diagnosing an allergy in a subject, the method comprising:

(i) contacting a sample obtained from the subject with an antigen;
(ii) detecting binding between an IgE antibody present in the sample from the subject and the antigen; and
(iii) when the binding between the IgE antibody in the subject and the antigen is detected, diagnosing the subject as being allergic;
wherein the antigen is at least one of polypeptides defined as the polypeptides comprising the amino acid sequences defined above in (E1) to (E50). In this method, the steps (i) and (ii) are performed as described above regarding the corresponding steps of the method for providing an indicator for diagnosing an allergy.

[0411] In another embodiment, the present invention provides a method for diagnosing an allergy in a subject, the method comprising administering to the subject at least one of the polypeptides comprising the amino acid sequences defined above in (E1) to (E50). This method may be performed in the form of a skin test characterized by applying the polypeptide comprising the amino acid sequences defined above in (E1) to (E50) onto the skin. Examples of the skin test include various forms of tests, such as: a prick test in which a diagnosis composition is applied onto the skin and then a tiny prick to such an extent as not to provoke bleeding is made in the skin to allow the polypeptides comprising the amino acid sequences defined above in (E1) to (E50) to penetrate the skin, thereby observing a skin reaction; a scratch test in which a diagnosis composition is applied onto the skin and then the skin is lightly scratched to observe a reaction; a patch test in which a diagnosis composition in the form of cream, ointment, etc. is applied onto the skin to observe a reaction; and an intracutaneous test in which the polypeptides comprising the amino acid sequences defined above in (E1) to (E50) are administered intracutaneously to observe a reaction. If a skin reaction such as swelling occurs in a skin portion to which the polypeptide comprising the amino acid sequences defined above in (E1) to (E50) has been applied, the subject of interest is diagnosed as having an allergy. The amount of the aforementioned polypeptide to be applied to the skin in such tests can be, for example, not more than 100 μg per dose.

[0412] In the process of allergy diagnosis, an oral load test aiming to identify an antigen and to examine the degree of symptoms from antigen consumption is often adopted. At least one of the polypeptides comprising the amino acid sequences defined above in (E1) to (E50) can be used as an active ingredient for an oral load test to diagnose an allergy. Here, the polypeptide to be used in the oral load test may be a polypeptide that has been expressed and purified and may be a polypeptide that has been expressed in raw materials or processed products, such as rice-based vaccine expressing pollen allergens which are obtained by transforming rice with a gene of a cedar pollen antigen and expressing the polypeptide in the rice.

[0413] In one embodiment, the diagnosis composition or the diagnosis kit described above may be used for a prick test, a scratch test, a patch test, an intracutaneous test or the like.

[0414] In still another embodiment, the present invention provides at least one of the polypeptides comprising the amino acid sequences defined above in (E1) to (E50), intended for use in the diagnosis of an allergy.

[0415] In still another embodiment, the present invention provides use of at least one of the polypeptides comprising the amino acid sequences defined above in (E1) to (E50) in the production of a diagnostic agent for an allergy.

[0416] In this subsection, the allergy to be diagnosed can be allergies to the aforementioned polypeptides comprising the amino acid sequences defined above in (E1) to (E50). Thus, diagnosis of the allergy including detection of the allergy and provision of a diagnostic indicator can be diagnosis of not only an allergy to a single one of the polypeptides comprising the amino acid sequences defined above in (E1) to (E50), but also allergies including cross-reactivity.

[0417] Composition and Treatment Method (2)

[0418] The present invention provides a composition comprising at least one of the polypeptides comprising the amino acid sequences defined above in (E1) to (E50).

[0419] In one embodiment, the composition of the present invention is a pharmaceutical composition. In one embodiment, the composition of the present invention is a quasi-pharmaceutical composition or a non-pharmaceutical composition (e.g., a cosmetic composition and a food composition).

[0420] In one embodiment, the aforementioned composition is used for the treatment of an allergy. The treatment of an allergy increases the limit amount of a polypeptide in which the polypeptide does not develop even if the antigen is incorporated into the body, and finally aims for the state where the allergy does not develop by the common amount of the polypeptide to be consumed (remission).

[0421] The present invention also provides a method for treating an allergy, the method comprising administering at least one of the polypeptides comprising the amino acid sequences defined above in (E1) to (E50) to a patient in need of a treatment for an allergy.

[0422] In another embodiment, the present invention provides at least one of the polypeptides comprising the amino acid sequences defined above in (E1) to (E50), intended for use in the treatment for an allergy. In yet another embodiment, the present invention provides use of at least one of the polypeptides comprising the amino acid sequences defined above in (E1) to (E50) for the production of a therapeutic agent for an allergy.

[0423] In the process of allergy treatment, a hyposensitization therapy aiming to induce immunological tolerance by administering an antigen to a patient is often adopted. The at least one of the polypeptides comprising the amino acid sequences defined above in (E1) to (E50) can be used as an active ingredient for hyposensitization therapy for an allergy. Here, the antigen to be used in the hyposensitization therapy may be a polypeptide that has been expressed and purified and may be a polypeptide that has been expressed in raw materials or processed products as rice, such as rice-based vaccine expressing pollen allergens.

[0424] The administration route, administration dose, frequency and/or period of the composition of this invention, and other ingredients to be contained in the composition, and the dosage form can be as described above in the subsection titled “Composition and treatment method (1)”. In the case of using the polypeptides comprising the amino acid sequences defined above in (E1) to (E50), for example, the dose to an adult patient may be a dose of not more than 100 μg per dose.

[0425] In this subsection, the allergy to be treated can be allergies to the polypeptides comprising the amino acid sequences defined above in (E1) to (E50). Thus, treatment of the allergy can be treatment of not only an allergy to a single allergen, but also allergies including cross-reactivity.

[0426] Tester Composition (2)

[0427] The present invention provides a tester composition comprising an antibody for at least one of the polypeptides comprising the amino acid sequences defined above in (E1) to (E50).

[0428] The antibody can be prepared by a conventional method. For example, the antibody may be prepared by immunizing a mammal such as rabbit with the polypeptides comprising the amino acid sequences defined above in (E1) to (E50). The antibody may be an Ig antibody, a polyclonal antibody, a monoclonal antibody, or an antigen-binding fragment thereof (e.g., Fab, F(ab′)2, Fab′).

[0429] Further, in the aforementioned tester composition, the antibody may be provided in a form bound to a carrier. The type of the carrier is not particularly limited as long as it is usable for detection of binding between an antibody and the polypeptides comprising the amino acid sequences defined above in (E1) to (E50). Any given carrier known to those skilled in the art can be used. Also, the antibody for the polypeptides comprising the amino acid sequences defined above in (E1) to (E50) is preferably an antibody for polypeptides having the same amino acid sequences as the epitope and the important amino acid described above in the subsection titled “Epitope of antigen”. This can attain a tester composition that can also detect cross-reactivity.

[0430] Examples of a method for determining the presence or absence of the polypeptides comprising the amino acid sequences defined above in (E1) to (E50) include the following methods:

[0431] a method in which a prepared tester composition comprising an antibody is contacted with a sample obtained from a raw material, a processed product, etc., ELISA or the like is used to detect whether there is a binding between the antibody and the polypeptides comprising the amino acid sequences as defined above in (E1) to (E50) in the sample, and if the binding between the antibody and the polypeptides comprising the amino acid sequences defined above in (E1) to (E50) is detected, it is determined that the polypeptides comprising such amino acid sequences are contained in the raw material, the processed product, etc. of interest (the “method for determining the presence or absence of a polypeptide” comprises confirming that the polypeptide is eliminated or reduced when the binding between the antibody and the polypeptides comprising the amino acid sequences defined above in (E1) to (E50) is reduced); and a method in which filter paper is impregnated with a raw material, a processed product, etc. and reacted with an antibody solution so as to detect the polypeptides comprising the amino acid sequences defined above in (E1) to (E50) contained therein.

[0432] Another embodiment of the present invention includes a tester composition for determining the presence or absence of a polypeptide comprising the amino acid sequences defined above in (E1) to (E50) of an allergy in an object of interest, the tester composition comprising a primer appropriate for a polypeptide having an amino acid sequence where epitope and important amino acid are identical. The primer is not limited and may be designed so as to comprise, for example, a portion of the nucleotide sequence of a nucleic acid encoding any of the amino acid sequences defined above in (E1) to (E50), or a complementary strand thereof. Alternatively, the primer may be designed so as to be the nucleotide sequence of a region upstream of a portion encoding polypeptides having the same amino acid sequences as an epitope that is any of the amino acid sequences defined above in (E1) to (E50), and an important amino acid, in nucleic acids encoding proteins comprising the polypeptides having the same amino acid sequences as the epitope and the important amino acid, or the nucleotide sequence of a complementary strand of a region downstream of the portion encoding polypeptides having the same amino acid sequences as the epitope and the important amino acid. Examples of such a primer include a primer which is a portion of at least one nucleotide sequence selected from the group consisting of SEQ ID NOs: 1, 3, 5, 7, 9, 11, 13, 15, 17, 19, 21, 23, 25 and 27 and/or a primer which is a portion of a sequence complementary to at least one nucleotide sequence selected from the group consisting of SEQ ID NOs: 1, 3, 5, 7, 9, 11, 13, 15, 17, 19, 21, 23, 25 and 27. Here, the position of the epitope in the full-length sequence of an antigen is as defined in Table 2 on the basis of the results of Examples. Particularly, when mRNA is of interest, the tester composition has a complementary primer of a poly-A tail.

[0433] For example, DNA is amplified by PCR (Polymerase Chain Reaction) including RT-PCR using templated DNA or mRNA obtained from a sample and the aforementioned primer, and the presence or absence of a nucleic acid encoding the amino acid sequences defined above in (E1) to (E50) in the sequence of the amplified DNA is determined to determine the presence or absence of the antigen comprising the aforementioned (E1) to (E50). Amplification methods by PCR for mRNA of interest can be exemplified by RACE. When one of amino acid sequences encoded by three possible open reading frames in the amplified DNA comprises any of the amino acid sequences defined above in (E1) to (E50), it is determined that the antigen is present. When no DNA is amplified, it is determined that the antigen is absent.

[0434] In one embodiment, the aforementioned tester composition is used to determine the presence or absence of the polypeptides comprising the amino acid sequences defined above in (E1) to (E50) in raw materials or processed products of interest in a food production line. The raw material may be a cooking ingredient or may be a cosmetic raw material, a pharmaceutical raw material or the like. The processed product may be an edible processed product or may be a cosmetic, a pharmaceutical product or the like. The tester composition may also be used for search for organism species contained in raw materials, may be used for quality inspection of production lines and pre-shipment products by manufacturers, or may be used for self-checking of the presence or absence of an antigen in raw materials or processed products of interest by consumers or users.

[0435] Method for Determining Presence or Absence of Polypeptide (2)

[0436] The present invention includes a method for determining the presence or absence of the polypeptides comprising the amino acid sequences defined above in (E1) to (E50) in a raw material or a processed product. This method comprises detecting a polypeptide having the whole or a portion of any of the amino acid sequences of the polypeptides comprising the amino acid sequences defined above in (E1) to (E50) in a raw material or a processed product.

[0437] In one embodiment, the method of the present invention comprises a step of determining the presence or absence of at least one of the polypeptides comprising the amino acid sequences defined above in (E1) to (E50) in a substance of interest, the step comprising contacting an antibody for the at least one of the polypeptides comprising the amino acid sequences defined above in (E1) to (E50) with a raw material or a processed product (including a liquid).

[0438] Such an antibody, definition of the raw material or the processed product, a method for preparing the antibody, a method for contacting the antibody with a raw material or a processed product, the binding between the antibody and the antigen, etc. are as described above in the subsection titled “Tester composition (2)”.

[0439] Alternatively, the aforementioned method for determining the presence or absence of an antigen also includes a embodiment in which a portion of an epitope in the polypeptides comprising the amino acid sequences defined above in (E1) to (E50) contained in an antigen is detected. The “portion of an epitope” is preferably at least 4 amino acid residues, at least 6 amino acid residues or at least 8 amino acid residues. Detection of the portion of an epitope can be carried out by a known method for detecting a particular amino acid sequence that is a portion of a polypeptide. For example, a method is possible in which a protein in a raw material, a processed product, etc. (e.g., a cooking ingredient) of interest is cleaved with a digestive enzyme for an antigen elimination treatment and separated by HPLC or the like, and whether a peak of an any given epitope peptide is reduced by the antigen elimination treatment is measured. Alternatively, the presence or absence of an antigen comprising any of the polypeptides comprising the amino acid sequences defined above in (E1) to (E50) in a substance of interest may be determined using an antibody that recognizes a portion of the polypeptides comprising the amino acid sequences defined above in (E1) to (E50).

[0440] Antigen-Free Raw Materials and the Like (2)

[0441] The present invention provides a food raw material or an edible processed product in which at least one of the polypeptides comprising the amino acid sequences defined above in (E1) to (E50) is eliminated or reduced.

[0442] The method for eliminating or reducing the antigen of the present invention in raw materials or processed products is not limited. The elimination or reduction of the antigen may be conducted by any method, as long as the method permits the elimination or reduction of the polypeptides comprising the amino acid sequences defined above in (E1) to (E50). For example, the techniques described above in the subsection titled “Antigen-free food and the like” may be used.

[0443] Elimination or reduction of at least one of the polypeptides comprising the amino acid sequences defined above in (E1) to (E50) may be achieved by eliminating or reducing the whole amino acid sequence or may be achieved by cleaving or removing the the amino acid sequence moieties defined above in (E1) to (E50) from the antigen protein. The “removal” includes deletion and modification of the whole or a portion of the sequence moieties defined above in (E1) to (E50).

[0444] For example, the raw material in which the polypeptides comprising the amino acid sequences defined above in (E1) to (E50) are eliminated or reduced may be obtained by preparing a raw material in which the polypeptides comprising the amino acid sequences defined above in (E1) to (E50) are no longer expressed, using a genetic modification technique. Any technique known to those skilled in the art can be used as a genetic modification knock-out technique.

[0445] The processed product in which the polypeptides comprising the amino acid sequences defined above in (E1) to (E50) are eliminated or reduced may be a processed product of the raw material in which the polypeptides comprising the amino acid sequences defined above in (E1) to (E50) are eliminated or reduced, such as powdered milk obtained with a protein digest as a raw material. In the case of using an ordinary raw material, a treatment for removing or reducing the polypeptides comprising the amino acid sequences defined above in (E1) to (E50) is performed before, during or after preparation of a processed product. The “preparation of the processed product” means, for example, preparation of a processed food product (e.g., processed products of wheat, for example, bread, pasta, wheat needle and cake) from a food raw material (e.g., wheat).

[0446] The techniques described in the subsection titled “Antigen-free food and the like” may be used as methods for removing or reducing the polypeptides comprising the amino acid sequences defined above in (E1) to (E50) in processed products obtained with an ordinary raw materials. Examples of the method for cleaving the polypeptides comprising the amino acid sequences defined above in (E1) to (E50) include a method in which a polypeptide is treated by cleavage with a particular digestive enzyme.

[0447] Method for Producing Raw Material or Processed Product in which Antigen is eliminated or reduced (2)

[0448] The present invention provides a method for producing a raw material or a processed product in which at least one of the polypeptides comprising the amino acid sequences defined in (E1) to (E50) is eliminated or reduced, the method comprising the step of confirming that the antigen is eliminated or reduced, in a production process of the processed product.

[0449] In the production method, elimination or reduction of the polypeptides comprising the amino acid sequences defined in (E1) to (E50) means that at least one of the polypeptides comprising the amino acid sequences defined above in (E1) to (E50) is eliminated or reduced, or the sequence moieties defined in (E1) to (E50) are cleaved or removed from the antigen.

[0450] A technique of confirming that the polypeptide is eliminated or reduced in the production process of the raw material or processed product is not particularly limited, and any technique capable of detecting at least one of the polypeptides comprising the amino acid sequences defined above in (E1) to (E50) may be used. For example, the presence or absence of the polypeptide in the raw material or processed product may be confirmed from the binding activity of an antibody for at least one of the polypeptides comprising the amino acid sequences defined above in (E1) to (E50) against a sample containing a material resulting from the production process of the raw material or processed product. Details of such a method are as described above in the subsection titled “Diagnosis kit and method”. Thus, in the production method, the “IgE antibody from a subject” described above in the subsection titled “Diagnosis kit and method (2)” is replaced with the “antibody for at least one of the polypeptides comprising the amino acid sequences defined above in (E1) to (E50)”, and the “antigen” “polypeptide” described above in the subsection titled “Diagnosis kit and method (2)” is replaced with the “sample containing a material resulting from the production process of the processed product”. The techniques described above in the subsection titled “Diagnosis kit and method (2)” can be used to confirm that the antigen is eliminated or reduced in the production process of the processed product. The tester compositions described above in the subsection titled “Tester composition (2)” can also be used.

[0451] The present invention also relates to use of a kit in a method for diagnosing an allergy, use of a kit for diagnosing an allergy and/or for providing an indicator for diagnosis, a composition for use in a method for diagnosing an allergy, use of a composition for diagnosing an allergy and/or for providing an indicator for diagnosis, a method for diagnosing an allergy and/or for a providing an indicator for diagnosis, use of an antigen (protein antigen or epitope antigen) in a method for detecting the presence or absence of an IgE antibody in a sample obtained from a subject (an organism such as a human), an antigen (protein antigen or epitope antigen) for use in treatment of an allergy, a kit or a composition for detecting the binding between an IgE antibody in a sample obtained from a subject (an organism such as a human) and an antigen (protein antigen or epitope antigen), comprising the antigen (protein antigen or epitope antigen), and use of a kit or a composition for detecting the binding between an IgE antibody in a sample obtained from a subject (an organism such as a human) and an antigen (protein antigen or epitope antigen), the kit or the composition comprising the antigen (protein antigen or epitope antigen). Each term such as the “antigen” is as mentioned above.

### EXAMPLES

[0452] The following describes examples of the present invention. The technical scope of this invention is not limited by these examples.

### Example 1: Confirmation of a Protein Pattern

[0453] Proteins contained in wheat (Triticum aestivum) were investigated using a two-dimensional electrophoresis method described below.

[0454] Protein Extraction

[0455] Extraction and purification of proteins contained in wheat were carried out as follows. The proteins were extracted by adding mammalian cell lysis kit; MCL1 (produced by Sigma-Aldrich Co. LLC) to wheat flour. The constituents of the mammalian cell lysis kit; MCL1 are as mentioned below.

[0456] 50 mM Tris-HCl pH 7.5

[0457] 1 mM EDTA

[0458] 250 mM NaCl

[0459] 0.1% (w/v) SDS

[0460] 0.5% (w/v) Deoxycholic acid sodium salt

[0461] 1% (v/v) Igepal CA-630 (surfactant (Octylphenoxy)polyethoxyethanol produced by Sigma-Aldrich Co. LLC)

[0462] Appropriate amount of Protease Inhibitor

[0463] Thereafter, the precipitation procedure was repeated twice using 2D-CleanUP Kit (produced by GE). In the first round of precipitation, the collected liquid protein extract was precipitated by adding TCA (trichloroacetic acid) thereto and the precipitated product produced by this procedure (TCA-precipitated product) was collected. In the second round of precipitation, the TCA-precipitated product collected above was further precipitated by adding acetone thereto and the precipitated product (sample) produced by this procedure was collected.

[0464] Preparation of a Sample Solution

[0465] Part of the collected sample (50 μg on a protein weight basis) was dissolved in 150 μL of a DeStreak Rehydration Solution (produced by GE), which is a swelling buffer for first-dimensional isoelectric focusing gels, thereby obtaining a sample solution for first-dimensional isoelectric focusing (sample solution for swelling). The constituents of the DeStreak Rehydration Solution are as mentioned below.

[0466] 7M thiourea

[0467] 2M urea

[0468] 4% (w/v) of CHAPS

[0469] 0.5% (v/v) IPG buffer; produced by GE

[0470] Moderate amount of BPB (bromophenol blue)

[0471] Penetration of the Sample into First-Dimensional Isoelectric Focusing Gels

[0472] First-dimensional isoelectric focusing gel strips (Immobiline Drystrip IPG gels (pH3-10NL); produced by GE) were immersed in 140 μL of the foregoing sample solution for first-dimensional isoelectric focusing (sample solution for swelling) and impregnated with the solution at room temperature overnight.

[0473] In this example, an IPGphor electrophoresis system produced by GE was used.

[0474] An electrophoresis tray was filled with silicone oil. Filter paper moisten with water was positioned at both ends of the gel strips impregnated with the sample, and the gel strips were set in the electrophoresis tray such that the gel strips were covered with silicone oil. Electrodes were placed on the gel strips with the filter paper intervening therebetween.

[0475] The maximum current of the isoelectric focusing system was set to 75 μA per gel strip, and the first-dimensional isoelectric focusing was carried out according to the following voltage program: (1) a constant voltage step was performed at a constant voltage of 300 V until the volt-hours reached 750 Vhr (the current variation width during electrophoresis for 30 minutes before the end of this step was 5 μA); (2) the voltage was increased gradually to 1000 V for 300 Vhr; (3) the voltage was further increased gradually to 5000 V for 4500 Vhr; and then (4) the voltage was held at a constant voltage of 5000 V until the total Vhr reached 12000.

[0476] SDS Equilibration of Isoelectric Focusing Gels

[0477] After the aforementioned first-dimensional isoelectric focusing was done, the gel strips were taken out of the isoelectric focusing system, immersed in an equilibration buffer containing a reducing agent, and shaken at room temperature for 15 minutes. The constituents of the equilibration buffer containing the reducing agent are as mentioned below.

[0478] 100 mM Tris-HCl (pH 8.0)

[0479] 6M urea

[0480] 30% (v/v) glycerol

[0481] 2% (w/v) SDS

[0482] 1% (w/v) DTT

[0483] Next, the equilibration buffer containing the reducing agent was removed, and then the gel strips were immersed in an equilibration buffer containing an alkylating agent and shaken at room temperature for 15 minutes to obtain SDS-equilibrated gels. The constituents of the equilibration buffer containing the alkylating agent are as mentioned below.

[0484] 100 mM Tris-HCl (pH 8.0)

[0485] 6M urea

[0486] 30% (v/v) glycerol

[0487] 2% (w/v) SDS

[0488] 2.5% (w/v) iodoacetamide

[0489] Second-dimensional SDS-PAGE

[0490] In this example, the XCell SureLock Mini-Cell electrophoresis system produced by Life Technologies was used. The second-dimensional electrophoresis gels used were NuPAGE 4-12% Bis-Tris Gels produced by Life Technologies. Also, an electrophoresis buffer composed of the following constituents was prepared and used.

[0491] 50 mM MOPS

[0492] 50 mM Tris base

[0493] 0.1% (w/v) SDS

[0494] 1 mM EDTA

[0495] Further, an agarose solution for gel adhesion was used in this example, which was prepared by dissolving 0.5% (w/v) Agarose S (produced by Nippon Gene Co., Ltd.) and a moderate amount of BPB (bromophenol blue) in the electrophoresis buffer.

[0496] SDS-PAGE wells were washed well with the electrophoresis buffer, and then the buffer used for the washing was removed. Next, the washed wells were charged with the fully dissolved agarose solution for gel adhesion. Next, the SDS-equilibrated gel strips were immersed in agarose and closely adhered to second-dimensional electrophoresis gels using tweezers. After it was confirmed that agarose was fully fixed with the gels being closely adhered to each other, electrophoresis was performed at a constant voltage of 200 V for about 45 minutes.

[0497] Fluorescent Staining of Gels

[0498] The gels were fluorescently stained with SYPRO Ruby (produced by Life Technologies).

[0499] First, an airtight container to be used was washed well in advance with 98% (v/v) ethanol. The electrophoresed second-dimensional electrophoresis gel strips were taken out of the SDS-PAGE system, placed onto the washed airtight container, and treated twice by immersion in 50% (v/v) methanol and 7% (v/v) aqueous solution containing acetic acid for 30 minutes. Then, a further immersion treatment was done for 10 minutes, with the solution being replaced by water. Next, the second-dimensional electrophoresis gel strips were immersed in 40 mL of SYPRO Ruby and shaken at room temperature overnight. Thereafter, the SYPRO Ruby was removed, and then the second-dimensional electrophoresis gel strips were washed with water and shaken in 10% (v/v) methanol and 7% (v/v) aqueous solution containing acetic acid for 30 minutes. Further shaking was done for at least 30 minutes, with the solution being replaced by water.

[0500] Analysis

[0501] The second-dimensional electrophoresis gels obtained through the foregoing series of treatments were subjected to fluorescent image scanning on Typhoon 9500 (produced by GE). The results of the two-dimensional electrophoresis as to the proteins contained in the wheat are shown in FIG. 1. Molecular weight marker bands are found at the left of the photograph of the gel of each panel. The positions of the bands denote particular molecular weights (in KDa).

### Example 2: Identification of Antigens by Immunoblotting

[0502] Identification of antigens by immunoblotting was carried out by taking all the steps up to the step of “Second-dimensional SDS-PAGE” as described above in Example 1, followed by the steps of “Transfer to membrane”, “Immunoblotting” and “Analysis” as described below.

[0503] Transfer to Membrane

[0504] Transfer to membrane was done using the following transfer system and transfer buffer.

Transfer system: XCell SureLock Mini-Cell and XCell II Blot Module (produced by Life Technologies)
Transfer buffer: NuPAGE Transfer Buffer (X20) (produced by Life Technologies), used in a form diluted 200-fold with milliQ water.

[0505] To be specific, proteins in the two-dimensional electrophoresis gels were transferred to a membrane (PVDF membrane) according to the following procedure.

[0506] (1) The PVDF membrane was immersed in 100% methanol followed by milliQ water, and then moved into the transfer buffer to hydrophilize the PVDF membrane.

[0507] (2) After sponge, filter paper, the gels treated by second-dimensional SDS-PAGE, the hydrophilized PVDF membrane, filter paper, and sponge were put in place in this order, the transfer system was energized at a constant voltage of 30 V for one hour.

[0508] Immunoblotting

[0509] Immunoblotting of the membrane was carried out using, as a primary antibody, a serum sample from a patient with a wheat allergy (WDEIA cases and cases with general immediate type allergy, which requires no exercise for its development) or a serum sample from a non-wheat-allergic subject.

[0510] Immunoblotting of the membrane was carried out according to the following procedure.

(1) The transferred membrane was shaken in a 5% skim milk/PBST solution (a PBS buffer containing 0.1% Tween 20 nonionic surfactant) at room temperature for one hour.
(2) The membrane was left to stand in a solution of 4% primary antibody serum in 3% skim milk/PBST at room temperature for one hour.
(3) The membrane was washed with a PBST solution (5 min×3 times).
(4) The membrane was left to stand in a 1:1000 dilution of the secondary antibody, anti-human IgE-HRP (horseradish peroxidase), with a 3% skim milk/PBST solution at room temperature for one hour.
(5) The membrane was washed with a PBST solution (5 min×3 times).
(6) The membrane was left to stand in Pierce Western Blotting Substrate Plus (produced by Thermo Fisher Scientific) for 5 minutes.

[0511] Analysis

[0512] The membrane obtained through the foregoing series of treatments was subjected to fluorescent image scanning on Typhoon 9500 (produced by GE).

[0513] The immunoblots obtained with the serum from the wheat-allergic patient were compared with those obtained with the control serum from the non-wheat-allergic subject. For protein present in wheat, in immunoblotting using the serum from the wheat-allergic patient, 16 spots were detected (FIG. 2), which are different from the spots detected when the serum of the non-wheat-allergic subject was used and different from those of the known wheat allergen proteins. As a result of analyzing the amino acid sequences in Example 3, spots 11 and 12 or spots 15 and 16 were found to be derived from the same protein. The isoelectric point of each spot is described in Table 1.

### Example 3: Mass Spectrometry and Identification of Antigens

[0514] The amino acid sequences of the antigens that form the protein spots were identified by mass spectroscopy.

[0515] To be specific, protein extraction and mass spectroscopy were done by the following procedure.

(1) Wheat was subjected to protein extraction, two-dimensional electrophoresis and transfer to membrane by following the procedures described in Example 1 and 2, and the resulting membrane was stained by shaking in a solution of 0.008% Direct blue in 40% ethanol and 10% acetic acid.
(2) Then, the membrane was decolorized by repeating a 5-minute treatment with 40% ethanol and 10% acetic acid three times, washed with water for 5 minutes, and then dried by air.
(3) A protein spot of interest was cut out with a clean cutter blade and put into a centrifugal tube. The cut membrane was subjected to hydrophilization with 50 μL of methanol, followed by washing with 100 μL of water twice and then centrifugal cleaning. Thereafter, 20 μL of 20 mM NH₄HCO₃ and 50% acetonitrile were added.
(4) 1 μL of 1 pmol/μL lysyl endopeptidase (produced by WAKO) was added, and the solution was left to stand at 37° C. for 60 minutes and then collected in a new centrifugal tube. After 20 μL of 20 mM NH₄HCO₃ and 70% acetonitrile were added to the membrane, the membrane was immersed therein at room temperature for 10 minutes, and the resulting solution was further collected. The solution was dissolved with 0.1% formic acid and 10 μL of 4% acetonitrile and transferred to a tube.
(5) The collected solution was dried under reduced pressure, dissolved with 15 μL of solution A (a 0.1% formic acid/4% acetonitrile solution), and analyzed by mass spectroscopy (ESI-TOF6600, produced by AB Sciex).
(6) Identification of proteins based on the MS data obtained with the mass spectrometer was done by searching the NCBI database.

[0516] Results

[0517] The amino acid sequence of each spot was detected. Further, the mass spectroscopic data of each spot obtained on a mass spectrometer was analyzed in Uniprot. As a result, each spot was found to be the protein shown in Table 1.

[0518] Spots 11 and 12 or spots 15 and 16 are derived from the same protein. The immunoblot of Example 2 recognized these spots as separate spots because even the same amino acid sequence varied in isoelectric point and/or molecular weight due to a posttranslational modification such as sugar chain modification or modification at a phosphate group. The binding to IgE antibodies was confirmed in spite of such difference in posttranslational modification, indicating that the posttranslational modification has no influence.

### Example 4: Identification of Epitopes

[0519] Epitopes of Allergen Components of Wheat

[0520] Identification of epitopes was carried out by the following procedure as to epitopes of allergen components of wheat.

[0521] (A) Wheat Epitope Mapping (1)

[0522] Epitope mapping was carried out using a library of overlapping peptides (length: 15 amino acids) corresponding to the amino acid sequences identified as allergy components of wheat. Specifically, the library of overlapping peptides was prepared on the basis of the amino acid sequences of SEQ ID NOs: 2, 4, 6, 8, 10, 12, 14, 16, 18, 20, 22, 24, 26 and 28.

[0523] The peptides to be synthesized were shifted by 10 amino acids. Thus, each peptide had an overlap of 5 amino acids with each of the peptides previous and subsequent thereto.

[0524] For preparation of peptide arrays, the Intavis CelluSpots™ technique was used. Specifically, the peptide arrays were prepared by the following procedure: (1) synthesizing peptides of interest on amino-modified cellulose disks using an automated chemical synthesis apparatus (Intavis MultiPep RS), (2) dissolving the amino-modified cellulose disks to obtain a cellulose-bound peptide solution, and (3) spotting the cellulose-bound peptides onto coated glass slides. The details of each procedure are as described below.

[0525] (1) Synthesis of Peptide

[0526] Peptide synthesis was carried out in incremental steps through 9-fluorenylmethoxycarbonyl (Fmoc) chemical reaction on amino-modified cellulose disks in 384-well synthesis plates. Specifically, amino acids in which a Fmoc group is bonded to an amino group were activated in a solution of N,N′-diisopropylcarbodiimide (DIC) and 1-hydroxybenzotriazole (HOBt) in dimethylformamide (DMF) and added dropwise to the cellulose disks so that the Fmoc group-bound amino acids were bound to the amino groups on the cellulose disks (coupling). Unreacted amino groups were capped with acetic anhydride and washed with DMF. Furthermore, the Fmoc groups were eliminated from the amino groups of the amino acids bound to the amino groups on the cellulose disks by treatment with piperidine and washing with DMF. The amino acids bound to the amino groups on the cellulose disks were repetitively subjected to the coupling, the capping, and the Fmoc group elimination described above to elongate the amino terminus for peptide synthesis.

[0527] (2) Dissolution of Amino-Modified Cellulose Disk

[0528] The peptides-bound cellulose disks of interest obtained above in the subsection titled “(1) Synthesis of peptide” were transferred to 96-well plates and treated with a side chain deprotection mixed solution of trifluoroacetic acid (TFA), dichloromethane, triisopropylsilane (TIPS), and water for deprotection of amino acid side chains. Then, the deprotected cellulose-bound peptides were dissolved in a mixed solution of TFA, perfluoromethanesulfonic acid (TFMSA), TIPS, and water and precipitated in tetrabutyl methyl ether (TBME), and the precipitate was resuspended in dimethyl sulfoxide (DMSO) and mixed with a mixed solution of NaCl, sodium citrate, and water to obtain a peptide solution for slide spotting.

[0529] (3) Spotting of Cellulose-Bound Peptide Solution

[0530] The peptide solution for slide spotting obtained above in the subsection titled “(2) Dissolution of amino-modified cellulose disk” was spotted onto Intavis CelluSpots™ slides using Intavis Slide Spotting Robot, and the slides were dried to prepare peptide arrays.

[0531] The presence or absence of binding, to each peptide fragment, of an IgE antibody present in the serum of a wheat-allergic patient was measured through antigen-antibody reaction using the peptide arrays. The measurement was carried out according to the following procedure.

(1) The peptides were shaken at room temperature for 1 hour in Pierce Protein-Free (PBS) Blocking Buffer (produced by Thermo Fisher Scientific).
(2) The peptide arrays were shaken at overnight at 4° C. in 2% serum/Pierce Protein-Free (PBS) Blocking Buffer (produced by Thermo Fisher Scientific).
(3) The peptide arrays were washed with PBST (a PBS buffer containing 3% Tween 20 nonionic surfactant) for 5 minutes (×3).
(4) Anti-human IgE antibody-HRP (1:20,000, Pierce Protein-Free (PBS) Blocking Buffer (produced by Thermo Fisher Scientific)) was added thereto, and the peptide arrays were shaken at room temperature for 1 hour.
(5) The peptide arrays were washed with PBST for 5 minutes (×3).
(6) Pierce ECL Plus Western Blotting Substrate (produced by Thermo Fisher Scientific) was added thereto, and the peptide arrays were shaken at room temperature for 5 minutes.
(7) The chemiluminescence of the peptides treated as described above in (1) to (6) was measured using Amersham Imager 600.

[0532] Chemiluminescence intensity in images obtained by the measurement described above in (7) was converted into a numeric value using ImageQuant TL (GE Healthcare). The second highest value among numeric values determined from images obtained from results about the serum of 5 non-wheat-allergic subjects was defined as the N2nd value. The N2nd value of each peptide was subtracted from numeric values determined from images obtained from results about the serum of 49 patients (32 WDEIA cases, 8 children cases with general immediate type allergy to wheat, and 9 adult cases). It was determined that a peptide having a value of at least 35,000 as the difference was a peptide bound to an IgE antibody in a patient-specific manner

[0533] As a result, patient-specific IgE antibodies were confirmed to bind to the peptides (SEQ ID NOS: 29, 131, 191, 281, 346, 414, 493, 562, 640, 706, 776, 899, 974, 1010, 1089, 1142, 1166, 1209, 1257, 1297, 1367, 1403, 1508, 1566, 1598, 1608, 1685, 1753, 1789, 1836, 1895, 1977, 2004, 2027, 2068, 2154, 2217, 2265, 2309, 2342, 2419, 2491, 2545, 2613, 2631, 2674, 2701, 2774, 2809 and 2830) derived from spots 1-16 (spots 11 and 12 or spots 15 and 16 are derived from the same protein) excluding known epitopes.

[0534] (B) Wheat Epitope Mapping (2): Overlapping

[0535] On the basis of the sequences (SEQ ID NOs: SEQ ID NO: 29, 131, 191, 281, 346, 414, 493, 562, 640, 706, 776, 899, 974, 1010, 1089, 1142, 1166, 1209, 1257, 1297, 1367, 1403, 1508, 1566, 1598, 1608, 1685, 1753, 1789, 1836, 1895, 1977, 2004, 2027, 2068, 2154, 2217, 2265, 2309, 2342, 2419, 2491, 2545, 2613, 2631, 2674, 2701, 2774, 2809 and 2830) of the peptides bound to an IgE antibody in serum in a patient-specific manner as described above in (A), a library of overlapping peptide fragments (length: 10 amino acids) was prepared using the sequences of the peptides and sequences in which sequences were added so as to flank each peptide in the amino acid sequences of allergy components comprising the sequences of the peptide. Epitope mapping was carried out using the library.

[0536] The peptides to be synthesized were shifted by one amino acid. Thus, each peptide had an overlap of 9 amino acids with each of the peptides previous and subsequent thereto.

[0537] The library was prepared by the same procedure as described above in (A), and the presence or absence of binding of an IgE antibody present in the serum of a patient to each peptide fragment was measured by the same technique as described above. Numeric values determined from images obtained as a result of carrying out only the procedures (1) and (4) to (6) described above in the subsection titled (3) Spotting of cellulose-bound peptide solution were used as control values. The control value of each peptide was subtracted from numeric values determined from images obtained from results about the serum of patients, and the obtained value of the difference was compared with values of the peptides serving as the basis of overlapping. It was determined that a peptide that lost or markedly decreased binding activity against IgE antibodies from patients as compared with the peptides shifted by one amino acid was a peptide having no binding activity against IgE antibodies.

[0538] Chemiluminescence intensity in images obtained by measurement was converted into a numeric value in the same manner as in (A). Numeric values determined from images obtained as a result of carrying out only the procedures (1) and (4) to (6) described above in the subsection titled (3) Spotting of cellulose-bound peptide solution (secondary antibody measurement values) were used as control values. The control value of each peptide was subtracted from numeric values determined from images obtained from results about the serum of patients. When values obtained using the sequences (SEQ ID NOs: 29, 131, 191, 281, 346, 414, 493, 562, 640, 706, 776, 899, 974, 1010, 1089, 1142, 1166, 1209, 1257, 1297, 1367, 1403, 1508, 1566, 1598, 1608, 1685, 1753, 1789, 1836, 1895, 1977, 2004, 2027, 2068, 2154, 2217, 2265, 2309, 2342, 2419, 2491, 2545, 2613, 2631, 2674, 2701, 2774, 2809 and 2830) serving as the basis of overlapping were defined as 100%, it was determined that: a peptide having a value of the difference that was less than 30% had no binding activity against IgE antibodies; a peptide having a value of the difference that was 30% or more and less than 50% had binding activity, albeit poor, against IgE antibodies; a peptide having a value of the difference that was 50% or more and less than 70% had binding activity, albeit somewhat poor, against IgE antibodies; and a peptide having a value of the difference that was 70% or more had equivalent or good binding activity against IgE antibodies and was thus a peptide had remaining binding activity against IgE antibodies.

[0539] This analysis found regions important for binding to IgE antibodies from patients, in the sequences serving as the basis of overlapping.

[0540] (C) Wheat Epitope Mapping (3): Alanine/Glycine Scanning

[0541] From the amino acid sequences identified above in (A), a library of peptide fragments in which amino-terminal amino acids were substituted one by one by alanine (or glycine when the original amino acid was alanine) according to a technique called alanine/glycine scanning (Non Patent Literature 5) was prepared by the same technique as described above. The presence or absence of binding of an IgE antibody present in the serum of a patient to each peptide fragment was measured by the same technique as described above. Amino acids at positions where the binding activity against IgE antibodies from patients was lost or markedly decreased by the substitution by alanine/glycine were confirmed as amino acids important for exertion of original antigenicity, or amino acids influencing exertion of original antigenicity. Amino acids at positions where the binding activity against IgE antibodies from patients was neither lost nor markedly decreased were confirmed as substitutable amino acids that were not important for exertion of original antigenicity.

[0542] Chemiluminescence intensity in images obtained by measurement was converted into a numeric value in the same manner as in (A). Numeric values determined from images obtained from secondary antibody measurement values were used as control values. The control value of each peptide was subtracted from numeric values determined from images obtained from results about the serum of 49 patients. When values obtained using the sequences (SEQ ID NOs: 29, 131, 191, 281, 346, 414, 493, 562, 640, 706, 776, 899, 974, 1010, 1089, 1142, 1166, 1209, 1257, 1297, 1367, 1403, 1508, 1566, 1598, 1608, 1685, 1753, 1789, 1836, 1895, 1977, 2004, 2027, 2068, 2154, 2217, 2265, 2309, 2342, 2419, 2491, 2545, 2613, 2631, 2674, 2701, 2774, 2809 and 2830) serving as the basis of alanine/glycine scanning were defined as 100%, it was determined that: a peptide having a value of the difference that was less than 30% had no binding activity against IgE antibodies; a peptide having a value of the difference that was 30% or more and less than 50% had binding activity, albeit poor, against IgE antibodies; a peptide having a value of the difference that was 50% or more and less than 70% had binding activity, albeit somewhat poor, against IgE antibodies; and a peptide having a value of the difference that was 70% or more had equivalent or good binding activity against IgE antibodies and was thus a peptide had remaining binding activity against IgE antibodies.

[0543] By analysis of the results of (A) to (C), common sequences important for exertion of original antigenicity were found in regions important for binding to IgE antibodies from patients, in the sequences serving as the basis of alanine/glycine scanning. The sequences of all 50 types of epitopes were identified, and the results were summarized in Table 2.

### Example 5: Confirmation of Epitope Cross-Reactivity

[0544] Amino acids other than amino acids important for maintaining binding to IgE antibodies, in each of the epitope sequences found in the wheat proteins in Table 2 were defined as any given amino acid (X). NCBI was searched for proteins having the key sequences having the amino acid residues X in cooking ingredient allergens carried in common by each of the patients. As a result, an amino acid sequence contained in a sequence in each food described in the column “Food with which cross-reactivity was confirmed” in Table 2 was identified as one example.

[0545] The binding activity of peptides comprising the amino acid sequences described in the column “Synthesis sequence” and the rightmost column “SEQ ID NO” of Table 2 against IgE antibodies from patients having allergies to each food described in the column “Food with which cross-reactivity was confirmed” in Table 2 was confirmed by ELISA. The peptides were synthesized such that the peptides were N-terminally biotinylated by the Fmoc method.

[0546] To be specific, ELISA was carried out according to the following procedure.

[0547] (1) The concentrations of the biotinylated peptides were adjusted to 10 μg/mL with PBST (0.1% Tween 20).

[0548] (2) Each peptide solution was added at 20 μL to each well of a 384-well plate coated with streptavidin, and shaken at room temperature for one hour. After collection of the solution, the wells were washed with PBST five times.

[0549] (3) Pierce Protein-Free (PBS) Blocking Buffer (produced by Thermo) was added at 40 μL thereto and shaken at room temperature for one hour. After removal of the solution, the wells were washed with PBST five times.

[0550] (4) 2% serum/Canget SignalSolution I (produced by TOYOBO) was added at 20 μL thereto and shaken at room temperature for one hour. After removal of the solution, the wells were washed with PBST five times.

[0551] (5) A diluted secondary antibody solution (1:10000, Canget SignalSolution II (produced by TOYOBO)) was added at 20 μL thereto and shaken at room temperature for one hour. After removal of the solution, the wells were washed with PBST five times.

[0552] (6) 1-Step Ultra TMB-ELISA (produced by Thermo) was added at 20 μL thereto and shaken at room temperature for 15 minutes.

[0553] (7) 2 M H₂SO₄ was added at 20 μL thereto. Absorbance at 450 nm was measured.

[0554] Peptides having these amino acid sequences were prepared by the same procedure as described in Example 4(A), and the presence or absence of binding thereto of IgE antibodies present in the serum of an allergic patient and the serum of a nonallergic subject was measured. The serum of two nonallergic subjects was measured, and values obtained by dividing the measurement values by an average value thereof were used.

[0555] The results are shown in FIGS. 3 to 6. The bar graph of each figure depicts “absorbance of the allergic patient/absorbance of the nonallergic patient (healthy subject)”. The names of the cooking ingredients described in each graph are the names of cooking ingredients containing a polypeptide comprising an amino acid sequence serving as the basis of each synthetic sequence used.

[0556] As is evident from FIGS. 3 to 6, all the polypeptides having the amino acid sequences described in the figures exhibited higher binding activity (larger than “1”) against an IgE antibody from each allergic patient than against an IgE antibody in the serum of a nonallergic subject. Thus, these polypeptides were confirmed to have cross-reactivity. This indicates that their epitopes can be used for detecting cross-reactivity with antigens other than wheat antigens. This further supports that the “X” moiety can assume any given amino acid residue.

What is claimed is:

1. A kit for diagnosing an allergy, comprising at least one of the following polypeptides (E1) to (E50):
(E1) a polypeptide comprising at least one amino acid sequence selected from the amino acid sequences of SEQ ID NOs: 29-130 and 2880;
(E2) a polypeptide comprising at least one amino acid sequence selected from the amino acid sequences of SEQ ID NOs: 131-137 and 139-190;
(E3) a polypeptide comprising at least one amino acid sequence selected from the amino acid sequences of SEQ ID NOs: 191-280 (except for 227, 259, 269 and 273) and 2881;
(E4) a polypeptide comprising at least one amino acid sequence selected from the amino acid sequences of SEQ ID NOs: 281-341 and 343-345;
(E5) a polypeptide comprising at least one amino acid sequence selected from the amino acid sequences of SEQ ID NOs: 346-398, 400-413 and 2882;
(E6) a polypeptide comprising at least one amino acid sequence selected from the amino acid sequences of SEQ ID NOs: 414-492, 2883 and 2884;
(E7) a polypeptide comprising at least one amino acid sequence selected from the amino acid sequences of SEQ ID NOs: 493-561;
(E8) a polypeptide comprising at least one amino acid sequence selected from the amino acid sequences of SEQ ID NOs: 562-639;
(E9) a polypeptide comprising at least one amino acid sequence selected from the amino acid sequences of SEQ ID NOs: 640-705 and 2885-2888;
(E10) a polypeptide comprising at least one amino acid sequence selected from the amino acid sequences of SEQ ID NOs: 706-775 and 2889-2891;
(E11) a polypeptide comprising at least one amino acid sequence selected from the amino acid sequences of SEQ ID NOs: 776-898 and 2892;
(E12) a polypeptide comprising at least one amino acid sequence selected from the amino acid sequences of SEQ ID NOs: 899-973, 2893 and 2895;
(E13) a polypeptide comprising at least one amino acid sequence selected from the amino acid sequences of SEQ ID NOs: 974-1009;
(E14) a polypeptide comprising at least one amino acid sequence selected from the amino acid sequences of SEQ ID NOs: 1010-1088 and 2896-2899;
(E15) a polypeptide comprising at least one amino acid sequence selected from the amino acid sequences of SEQ ID NOs: 1089-1141;
(E16) a polypeptide comprising at least one amino acid sequence selected from the amino acid sequences of SEQ ID NOs: 1142-1165 and 2900;
(E17) a polypeptide comprising at least one amino acid sequence selected from the amino acid sequences of SEQ ID NOs: 1166-1208;
(E18) a polypeptide comprising at least one amino acid sequence selected from the amino acid sequences of SEQ ID NOs: 1209-1256;
(E19) a polypeptide comprising at least one amino acid sequence selected from the amino acid sequences of SEQ ID NOs: 1257-1296;
(E20) a polypeptide comprising at least one amino acid sequence selected from the amino acid sequences of SEQ ID NOs: 1297-1366;
(E21) a polypeptide comprising at least one amino acid sequence selected from the amino acid sequences of SEQ ID NOs: 1367-1402;
(E22) a polypeptide comprising at least one amino acid sequence selected from the amino acid sequences of SEQ ID NOs: 1403-1507;
(E23) a polypeptide comprising at least one amino acid sequence selected from the amino acid sequences of SEQ ID NOs: 1508-1565 and 2901;
(E24) a polypeptide comprising at least one amino acid sequence selected from the amino acid sequences of SEQ ID NOs: 1566-1597;
(E25) a polypeptide comprising at least one amino acid sequence selected from the amino acid sequences of SEQ ID NOs: 1598-1607;
(E26) a polypeptide comprising at least one amino acid sequence selected from the amino acid sequences of SEQ ID NOs: 1608-1684, 2902 and 2903;
(E27) a polypeptide comprising at least one amino acid sequence selected from the amino acid sequences of SEQ ID NOs: 1685-1752, 2904 and 2905;
(E28) a polypeptide comprising at least one amino acid sequence selected from the amino acid sequences of SEQ ID NOs: 1753-1788, 2906 and 2907;
(E29) a polypeptide comprising at least one amino acid sequence selected from the amino acid sequences of SEQ ID NOs: 1789-1835, 2908 and 2909;
(E30) a polypeptide comprising at least one amino acid sequence selected from the amino acid sequences of SEQ ID NOs: 1836-1894, 2910 and 2911;
(E31) a polypeptide comprising at least one amino acid sequence selected from the amino acid sequences of SEQ ID NOs: 1895-1976, 2912 and 2913;
(E32) a polypeptide comprising at least one amino acid sequence selected from the amino acid sequences of SEQ ID NOs: 1977-2003;
(E33) a polypeptide comprising at least one amino acid sequence selected from the amino acid sequences of SEQ ID NOs: 2004-2026;
(E34) a polypeptide comprising at least one amino acid sequence selected from the amino acid sequences of SEQ ID NOs: 2027-2067 and 2914;
(E35) a polypeptide comprising at least one amino acid sequence selected from the amino acid sequences of SEQ ID NOs: 2068-2153, 2915 and 2916;
(E36) a polypeptide comprising at least one amino acid sequence selected from the amino acid sequences of SEQ ID NOs: 2154-2216;
(E37) a polypeptide comprising at least one amino acid sequence selected from the amino acid sequences of SEQ ID NOs: 2217-2264 and 2917-2921;
(E38) a polypeptide comprising at least one amino acid sequence selected from the amino acid sequences of SEQ ID NOs: 2265-2308 and 2922-2925;
(E39) a polypeptide comprising at least one amino acid sequence selected from the amino acid sequences of SEQ ID NOs: 2309-2341;
(E40) a polypeptide comprising at least one amino acid sequence selected from the amino acid sequences of SEQ ID NOs: 2342-2418;
(E41) a polypeptide comprising at least one amino acid sequence selected from the amino acid sequences of SEQ ID NOs: 2419-2490;
(E42) a polypeptide comprising at least one amino acid sequence selected from the amino acid sequences of SEQ ID NOs: 2491-2544, 2926 and 2927;
(E43) a polypeptide comprising at least one amino acid sequence selected from the amino acid sequences of SEQ ID NOs: 2545-2612;
(E44) a polypeptide comprising at least one amino acid sequence selected from the amino acid sequences of SEQ ID NOs: 2613-2630;
(E45) a polypeptide comprising at least one amino acid sequence selected from the amino acid sequences of SEQ ID NOs: 2631-2673;
(E46) a polypeptide comprising at least one amino acid sequence selected from the amino acid sequences of SEQ ID NOs: 2674-2700 and 2928;
(E47) a polypeptide comprising at least one amino acid sequence selected from the amino acid sequences of SEQ ID NOs: 2701-2773 and 2929;
(E48) a polypeptide comprising at least one amino acid sequence selected from the amino acid sequences of SEQ ID NOs: 2774-2808, 2930 and 2931;
(E49) a polypeptide comprising at least one amino acid sequence selected from the amino acid sequences of SEQ ID NOs: 2809-2829; and
(E50) a polypeptide comprising at least one amino acid sequence selected from the amino acid sequences of SEQ ID NOs: 2830-2879 and 2932.

2. A composition for diagnosing an allergy, the composition comprising at least one of polypeptides (E1) to (E50) according to claim 1.

3. A method for providing an indicator for diagnosing an allergy in a subject, the method comprising the steps of:
(i) contacting a sample obtained from the subject with an antigen, wherein the sample is a solution comprising an IgE antibody;
(ii) detecting binding between the IgE antibody present in the sample obtained from the subject and the antigen; and
(iii) when the binding between the IgE antibody in the subject and the antigen is detected, an indicator of the fact that the subject is allergic is provided;
wherein the antigen is at least one of polypeptides (E1) to (E50) according to claim 1.

4. An antigen which is at least one of polypeptides (E1) to (E50) according to claim 1 and is causative of an allergy.

5. A composition comprising at least one antigen according to claim 4.

6. The composition according to claim 5, wherein the composition is intended for the treatment of an allergy.

7. A tester composition for determining the presence or absence of an antigen in a subject, the tester composition comprising an antibody that binds to at least one of polypeptides (E1) to (E50) according to claim 1.

8. A tester composition for determining the presence or absence of an antigen in an object of interest, the tester composition comprising at least one primer comprising a portion of the nucleotide sequence of a nucleic acid encoding any of polypeptides (E1) to (E50) according to claim 1, and/or a portion of a complementary strand thereof.

9. A tester composition for determining the presence or absence of an IgE antibody in a subject, the tester composition comprising polypeptides (E1) to (E50) according to claim 1.

10. A method for determining the presence or absence of polypeptides (E1) to (E50) according to claim 1 in a raw material or a processed product, comprising detecting the polypeptides (E1) to (E50) according to claim 1 in the raw material or the processed product.

11. A raw material or a processed product in which an antigen is eliminated or reduced, wherein the antigen is at least one of polypeptides (E1) to (E50) according to claim 1.

12. A method for producing a raw material or a processed product in which an antigen is eliminated or reduced, the method comprising the step of confirming that the antigen is eliminated or reduced, in a production process of the processed product, wherein the antigen is at least one of polypeptides (E1) to (E50) according to claim 1.

The application's sequence listing, which the Patent Office published only in electronic form, follows.

SEQUENCE LISTING (2932 sequences)

SEQ ID NO: 1 - DNA, 921 bp, Triticum aestivum
  CDS (1)..(921)
atgaagacctttctcatccttgccctccttgctattgtagcaaccaccgccagaattgcagttagagttccagtgccacaattgcagccacaaaatccatctcagcaacaaccacaagagcaagttccattggtacaacaacaacaatttccagggcagcaacaaccatttccaccacaacagccatatccgcagccgcaaccatttccatcacaacaaccatatctgcagctgcaaccatttccgcagccgcaactaccatatccgcagccgcaactaccatatccgcagccgcaactaccatatccgcagccgcaaccatttcgaccacaacaaccatatccacaatcgcaaccacagtattcgcaaccacaacaaccaatttcgcagcagcagcagcagcaacaacaacaacaacaacaaaaacaacaacaacaacaacaacaacagatccttcaacaaattttgcaacaacaactgattccatgcagggatgttgtattgcaacaacacagcatagcgtatggaagctcacaagttttgcaacaaagtacttaccagctggtgcaacaattgtgttgtcagcagctgtggcagatccccgagcagtcgcggtgccaagccatccacaatgttgttcatgctattattctgcatcaacagcaacaacaacaacaacaacaacaacaacaaccgttgagccaggtctccttccaacagcctcaacaacaatatccatcaggccagggctccttccagccatctcagcaaaacccacaggcccagggctctgtccagcctcaacaactgccccagtttgaggaaataaggaacctagcgctagagacgctacctgcaatgtgcaatgtctatatccctccatattgcaccattgctccagttggcatcttcggtactaac

SEQ ID NO: 2 - protein, 307 aa, Triticum aestivum
MKTFLILALLAIVATTARIAVRVPVPQLQPQNPSQQQPQEQVPLVQQQQFPGQQQPFPPQQPYPQPQPFPSQQPYLQLQPFPQPQLPYPQPQLPYPQPQLPYPQPQPFRPQQPYPQSQPQYSQPQQPISQQQQQQQQQQQQKQQQQQQQQILQQILQQQLIPCRDVVLQQHSIAYGSSQVLQQSTYQLVQQLCCQQLWQIPEQSRCQAIHNVVHAIILHQQQQQQQQQQQQPLSQVSFQQPQQQYPSGQGSFQPSQQNPQAQGSVQPQQLPQFEEIRNLALETLPAMCNVYIPPYCTIAPVGIFGTN

SEQ ID NO: 3 - DNA, 1050 bp, Triticum aestivum
  CDS (1)..(1050)
atgaagaccttcctcatctttgctctccttgccattgcggcgacaagtgccattgcacaaatggagactagccgcgtccctggtttggagaaaccatggcagcaacaaccattaccaccacaacaacaaccaccatgttcacagcaacaacaaccatttccacagcaacaacaaccaattattatactgcaacaatcaccattttcgcagcaacaacaaccagttctgccgcaacagcaaccagttattatactgcaacaaccaccattttcgcagcaacaacaaccagttctaccacaacaaccaccattttcacaacaacaacaacaacaacaacaacaacaaccaccattttcgcagcaacaacaaccagttctaccacaacaaccaccattttcacaacaacaacaaccaccattttcgcagcagcaacaaccatcttcacaacaaccaccttttccacaacaacaccaacagtttccacaacaacaaatccctgttgttcaaccatccgttttgcagcagctaaacccatgcaaggtgttcctccaacagcagtgtagccatgtggcaatgtcgcaacgtcttgctaggtcacaaatgtggcaacagagtagttgccatgtgatgcaacaacaatgttgccaacagctgccgcaaatccccgaacaatcccgctctgaggcaatccgtgccatcgtctactccatcatcctgcaagaacaacaacagggttttgtccaacctcagcagcaacaaccccaacagtcgggccaaggtgtctcccaacaccaacagcagtcgcagcagcagcagcaactcggacagtgttctttccaacaacctcaacaactacaacaattgggtcagcagcctcaacaacaacagataccacagggtatattcttgcagccacaccagatatctcaacttgaggtgatgacttccattgcactccgtaccctgccaacgatgtgcggtgtcaacgtgccgttgtacagcttcgacccacttatgccatttagcattggcactggagttggtggctac

SEQ ID NO: 4 - protein, 350 aa, Triticum aestivum
MKTFLIFALLAIAATSAIAQMETSRVPGLEKPWQQQPLPPQQQPPCSQQQQPFPQQQQPIIILQQSPFSQQQQPVLPQQQPVIILQQPPFSQQQQPVLPQQPPFSQQQQQQQQQQPPFSQQQQPVLPQQPPFSQQQQPPFSQQQQPSSQQPPFPQQHQQFPQQQIPVVQPSVLQQLNPCKVFLQQQCSHVAMSQRLARSQMWQQSSCHVMQQQCCQQLPQIPEQSRSEAIRAIVYSIILQEQQQGFVQPQQQQPQQSGQGVSQHQQQSQQQQQLGQCSFQQPQQLQQLGQQPQQQQIPQGIFLQPHQISQLEVMTSIALRTLPTMCGVNVPLYSFDPLMPFSIGTGVGGY

SEQ ID NO: 5 - DNA, 981 bp, Triticum aestivum
  CDS (1)..(981)
atgaagaccttactcatcctgacaatccttgcgatggcaataaccatcggcaccgccaatatccaggtcgaccctagcggccaagtacaatggctacaacaacaactagtcccccagctccaacagccattatcccagcaaccacaacaaacatttccccaacctcaacaaacattcccccatcaaccacaacaacaagttccccagcctcagcaaccacaacaaccatttctccagccccaacaaccattcccccaacaaccacaacaaccattcccccagactcaacaaccacaacaaccatttccccagcaaccacaacaaccatttccccagactcaacaaccccaacaaccatttccccaacaaccacaacaaccattcccccagactcaacaaccccaacaaccatttccccagctccagcaaccacaacaaccttttccccagccccaacaacaattgccgcagccccaacaaccgcaacaatcattcccccaacaacaacggccattcattcaaccatctctacaacaacagttgaacccatgcaagaatatcctcttgcaacaatcgaaacctgcgtcattggtgtcatccctctggtcaataatctggccacaaagcgattgccaagtgatgcggcaacaatgctgccaacaactagcacagattcctcaacagctccagtgcgcagccatccatagcgtcgtgcattccatcatcatgcagcagcagcagcaacaacaacaacaacaaggcatcgatatctttctgccactatctcagcacgaacaggtgggtcaaggttctctagtccagggccagggcatcatccaaccacaacaaccagctcaattggaggcgatcagatcattggtgttgcaaactcttccatccatgtgcaacgtgtatgtcccacctgagtgctccatcatgagggcaccatttgccagcatagtcgcgggcattggtggccaa

SEQ ID NO: 6 - protein, 327 aa, Triticum aestivum
MKTLLILTILAMAITIGTANIQVDPSGQVQWLQQQLVPQLQQPLSQQPQQTFPQPQQTFPHQPQQQVPQPQQPQQPFLQPQQPFPQQPQQPFPQTQQPQQPFPQQPQQPFPQTQQPQQPFPQQPQQPFPQTQQPQQPFPQLQQPQQPFPQPQQQLPQPQQPQQSFPQQQRPFIQPSLQQQLNPCKNILLQQSKPASLVSSLWSIIWPQSDCQVMRQQCCQQLAQIPQQLQCAAIHSVVHSIIMQQQQQQQQQQGIDIFLPLSQHEQVGQGSLVQGQGIIQPQQPAQLEAIRSLVLQTLPSMCNVYVPPECSIMRAPFASIVAGIGGQ

SEQ ID NO: 7 - DNA, 1047 bp, Triticum aestivum
  CDS (1)..(1047)
gatgagctcatcaagaacgctgcctacattggcacccctggcaagggtatcctcgctgctgatgagtccaccggcaccatcggcaagcgcttcgccagcatcaatgttgagaacgttgaggacaaccgccgtgccctccgtgagctcctcttctgcacccctggtgccctccagtacctcagcggtgtgatcctcttcgaggagaccctgtaccagagcaccaagggtggcaagcccttcgtcgacatcctcaaggcgggcaatgtcctccccggaatcaaggtggacaagggtaccatcgagcttgctggaaccaacggtgagaccaccacccagggctttgatgaccttggcaagcgctgcgccaagtactatgaggctggtgcccgcttcgccaagtggcgtgcagtccttaagatcggcgccaccgagccatcacagctctccatcgaccagaacgctcagggtctggctcgctatgccatcatctgccaggagaatgggctggtgcccattgttgagcctgagatccttgttgatggacctcatgacattgaccgctgtgcttacgtgactgagatcgtccttgctgcctgctacaaggccctcaacgaccagcatgtcctccttgagggcaccctcctgaagcccaacatggtcacccctggatccgacgccaagaaggtggcccctgaggtgattgctgagtacaccgtccgcaccctccagaggaccgtccctgctgccgtccccgccattgtcttcctctccggtggacagagtgaggaggaggcgaccctgaacctgaacgccatgaacaagctccagaccaagaagccctggaacctgtccttctccttcgggcgtgccctccagcagagcaccctcaaggcctggtccggcaagacggagaacgaggagaaggccaggacggcgttcctggtgaggtgcaaggccaactccgaggccacccttggcacctacaagggcgacgccacccttggcgagggcgcctctgagagcctccacgtcaaggactacaagtac

SEQ ID NO: 8 - protein, 349 aa, Triticum aestivum
DELIKNAAYIGTPGKGILAADESTGTIGKRFASINVENVEDNRRALRELLFCTPGALQYLSGVILFEETLYQSTKGGKPFVDILKAGNVLPGIKVDKGTIELAGTNGETTTQGFDDLGKRCAKYYEAGARFAKWRAVLKIGATEPSQLSIDQNAQGLARYAIICQENGLVPIVEPEILVDGPHDIDRCAYVTEIVLAACYKALNDQHVLLEGTLLKPNMVTPGSDAKKVAPEVIAEYTVRTLQRTVPAAVPAIVFLSGGQSEEEATLNLNAMNKLQTKKPWNLSFSFGRALQQSTLKAWSGKTENEEKARTAFLVRCKANSEATLGTYKGDATLGEGASESLHVKDYKY

SEQ ID NO: 9 - DNA, 939 bp, Triticum aestivum
  CDS (1)..(939)
atgaagacctttctcatccttgccctccttgctatcgtggcgaccaccgccacaactgcagttagagttccagtgccacaattgcagccacaaaatccatctcagcaacagccacaagagcaagttccattggtacaacaacaacaatttccagggcagcaacaacaatttccaccacaacagccatatccgcagccgcaaccatttccatcacaacaaccatatctgcaactgcagccatttccgcagccgcaaccatttccgccacaactaccatatccgcagccgcaatcatttccaccacaacaaccatatccacaacagcaaccacagtatctacaaccacaacaaccaatttcgcagcaacaagcacaacaacaacaacaacaacaacaacaacaacaacaacaacaacaaatccttcaacaaattttgcaacaacaactgattccatgcagggatgttgtcttgcaacaacacaacatagcgcatgcaagctcacaagttttgcaacaaagtacttaccagctattgcaacaattgtgttgtcaacaactgttgcagatccctgagcagtcgaggtgccaagccatccataatgttgctcatgctattattatgcatcaacaacaacaacaacaacaagaacaacaacaacagttgcaacaacaacaacagcagcaactgcaacaacaacgacaacaaccgtcgagccaggtctccttccaacagcctcagcagcaatatccatcaagccaggtctccttccagccatctcagctaaacccacaggctcagggccccgtccaacctcaacaactgccccagttcgcggaaataaggaacctagcgctacagacgctacctgcaatgtgcaatgtctacatccctccacattgctcgaccaccattgcgccatttggcatcttcggtaccaac

SEQ ID NO: 10 - protein, 313 aa, Triticum aestivum
MKTFLILALLAIVATTATTAVRVPVPQLQPQNPSQQQPQEQVPLVQQQQFPGQQQQFPPQQPYPQPQPFPSQQPYLQLQPFPQPQPFPPQLPYPQPQSFPPQQPYPQQQPQYLQPQQPISQQQAQQQQQQQQQQQQQQQILQQILQQQLIPCRDVVLQQHNIAHASSQVLQQSTYQLLQQLCCQQLLQIPEQSRCQAIHNVAHAIIMHQQQQQQQEQQQQLQQQQQQQLQQQRQQPSSQVSFQQPQQQYPSSQVSFQPSQLNPQAQGPVQPQQLPQFAEIRNLALQTLPAMCNVYIPPHCSTTIAPFGIFGTN

SEQ ID NO: 11 - DNA, 885 bp, Triticum aestivum
  CDS (1)..(885)
atgaagacctttctcatccttgccctccttgctattgtagcaaccaccgccacagttgcagttagagttccagtgccacaattgcagccacaaaatccatctcagcaacaaccacaagagcaagttccattggtacaacaacagcaatttccagggcagcaacaaccatttccaccacaacagccatatccgcagccgcaaccatttccatcacaacaaccatatctgcagctgcaaccatttccgcagccgcaactaccatatccgcagccgcaaccatttcgaccacaacaaccatatccacaaccgcaaccacagtattcgcaaccacaacaaccaatttcacagcagcagcagcagcagcagcagcagcaacaacaacaacaacaacaacaacaacaacaaccacaacaaatccttcaacaaattttgcaacaacaactgattccatgcatgtatgttgtattgcagcaacacagcatagcgcaaggaagatcacaagttttgcaacaaagtacttaccagctgttgcaagaattgtgttgtcagcacctatggcagatccctgagcagtcgcagtgccaggccatccacaatgttgttcatgctattattctgcatcaacaacaaaaacaacaacaacaacaacaacaacaaccatcgagtcaggtctccttccaacagcctcagcaacaatatccattaggccagggctccttccggccatctcagcaaaacccacaggcccagggctctgtccagcctcaacaactgccccagttcgaggaaataaggaacctagcgctacagacactacctgcaatttgcaatgtctacatccctccatattgcaccatcgcgccatttggcatcttcggtactaac

SEQ ID NO: 12 - protein, 295 aa, Triticum aestivum
MKTFLILALLAIVATTATVAVRVPVPQLQPQNPSQQQPQEQVPLVQQQQFPGQQQPFPPQQPYPQPQPFPSQQPYLQLQPFPQPQLPYPQPQPFRPQQPYPQPQPQYSQPQQPISQQQQQQQQQQQQQQQQQQQQPQQILQQILQQQLIPCMYVVLQQHSIAQGRSQVLQQSTYQLLQELCCQHLWQIPEQSQCQAIHNVVHAIILHQQQKQQQQQQQQPSSQVSFQQPQQQYPLGQGSFRPSQQNPQAQGSVQPQQLPQFEEIRNLALQTLPAICNVYIPPYCTIAPFGIFGTN

SEQ ID NO: 13 - DNA, 1017 bp, Triticum aestivum
  CDS (1)..(1017)
atgaagaccttactcatcctgacaatcattgcggtggcactaactaccaccaccgccaatatacaggtcgaccctagtggccaagtacaatggccacaacaacaacaaccattcccccagccccaacaaccattctcccaacaaccacaacaaatttttccccaaccccaacaaacattcccccatcaaccacaacaagcatttccccaaccccaacaaacattcccccatcaaccacaacaacaatttccccagccccagcaaccacaacaaccatttccccagcaaccacaacaacaatttccccagccccaacaaccacaacaaccatttccccagcaaccacaacaacaatttccccagccccaacaaccacaacaaccatttccccagccccaacaaccccaactaccatttccgcaacaaccacaacaaccattcccccagcctcaacaaccccaacaaccatttccccagttacagcaaccacaacaacctttaccccagccccaacaaccgcaacaaccattcccccagcaacaacaaccattgattcagccatacctacaacaacagatgaacccctgcaagaattacctcttgcagcaatgcaaccctgtgtcattggtgtcatccctcgtgtcaatgatcttgccacgaagtgattgcaaggtgatgcggcaacaatgttgccaacaactagcacagattcctcagcagctccagtgcgcagccatccatggcatcgtgcattccatcatcatgcagcaagaacaacaacaacaacaacaacaacaacaacaacaacaacaacaacaaggcatacagatcatgcggccactatttcagctcgtccagggtcagggcatcatccaacctcaacaaccagctcaattggaggtgatcaggtcattggtattgggaactcttccaaccatgtgcaacgtgtttgttccacctgagtgctccaccaccaaggcaccatttgccagcatagtcgccgacattggtggccaa

SEQ ID NO: 14 - protein, 339 aa, Triticum aestivum
MKTLLILTIIAVALTTTTANIQVDPSGQVQWPQQQQPFPQPQQPFSQQPQQIFPQPQQTFPHQPQQAFPQPQQTFPHQPQQQFPQPQQPQQPFPQQPQQQFPQPQQPQQPFPQQPQQQFPQPQQPQQPFPQPQQPQLPFPQQPQQPFPQPQQPQQPFPQLQQPQQPLPQPQQPQQPFPQQQQPLIQPYLQQQMNPCKNYLLQQCNPVSLVSSLVSMILPRSDCKVMRQQCCQQLAQIPQQLQCAAIHGIVHSIIMQQEQQQQQQQQQQQQQQQGIQIMRPLFQLVQGQGIIQPQQPAQLEVIRSLVLGTLPTMCNVFVPPECSTTKAPFASIVADIGGQ

SEQ ID NO: 15 - DNA, 876 bp, Triticum aestivum
  CDS (1)..(876)
atgaagacctttctcatccttgccctccttgctatcgtggcgaccaccaccacaactgcagttagagttccagtgccacaattgcagccacaaaatccatctcagcaacaaccacaagagcaagttccattggtgcaacaacaacaatttctagggcagcaacaacaacaatttccagggcaacaacaaccatttccaccacaacagccatatccgcagccgcaaccatttctgccacaactaccatatccgcagccgcaaccatttccaccacaacaatcatatccacaaccacaaccacaatatccgcaaccacaacaaccaatttcgcagcaacaagcacaactacaacaacaacaacaacaacaacaacaacaacaacaacaaatccttcaacaaattctgcaacaacaactgattccatgcagggatgtcgtcttgcaacaacccaatatagcacatgcaagctcaaaagtatcgcaacaaagttaccaactgttgcaacaattatgttgtctgcaactgtggcagacccccgagcagtcacggtgccaagccatccacaatgtcattcatgctattattttgcatcatcaacaacaacaacaacaacaacaacaacaacaacaacaacaacaacaaccgtcgagccaggtctcctaccagcagcctcagcaacaatatccatcaggccagggcttcttccagccatctcagcaaaacccacaggcccagggctttgtccaacctcagcaactgccgcagttcgaggaaataaggaacctagcgctgcagacgctaccagcaatgtgcaatgtctacatccctccatattgctcgaccaccattgcgccatttggcatcatgagtactaac

SEQ ID NO: 16 - protein, 292 aa, Triticum aestivum
MKTFLILALLAIVATTTTTAVRVPVPQLQPQNPSQQQPQEQVPLVQQQQFLGQQQQQFPGQQQPFPPQQPYPQPQPFLPQLPYPQPQPFPPQQSYPQPQPQYPQPQQPISQQQAQLQQQQQQQQQQQQQILQQILQQQLIPCRDVVLQQPNIAHASSKVSQQSYQLLQQLCCLQLWQTPEQSRCQAIHNVIHAIILHHQQQQQQQQQQQQQQQQPSSQVSYQQPQQQYPSGQGFFQPSQQNPQAQGFVQPQQLPQFEEIRNLALQTLPAMCNVYIPPYCSTTIAPFGIMSTN

SEQ ID NO: 17 - DNA, 1095 bp, Triticum aestivum
  CDS (1)..(1095)
atgaagaccttcctcatctttgccctccttgccgttgcagcgacaagtgccattgcacaaatggagactagccacatccctggcttggagaaaccatcgcaacaacaaccattaccactacaacaaatattatggtaccaccaacagcaaccgatccaacaacaaccacaaccatttccacaacagccaccatgttcacagcaacaacaaccaccattatcgcagcaacaacaaccaccattttcacagcaacaaccaccattctcgcagcaagaactaccaattctaccgcaacaaccaccattttcgcagcaacaacaaccacaattttcgcagcaacaacaaccattcccgcagcaacaacaaccacttctactgcaacaacccccattttcacaacaacgaccaccattttctcagcagcagcaacaaccagttctaccgcaacaaccaccattttcgcaacagcaacaacaacaaccaattctaccgcaacaaccacctttttcgcaacaccaacaaccggttcttccgcaacaacaaataccatatgttcagccatctatcttgcagcagctaaacccatgcaaggtattcctccagcagcaatgcagccctgtggcaatgccacaaagtcttgctaggtcgcaaatgttgtggcagagcagttgccatgtgatgcagcaacaatgttgccagcagctgccgcgaatccccgaacaatcacgctatgatgcaatccgtgccatcatctactcgatcgtcctacaagaacaacaacatggtcagggtttcaaccaacctcagcagcaacaaccccaacagtcggtccaaggtgtctcccaaccccaacaacaacagaagcagctcggacagtgttctttccaacgacctcaacaacaacaactgggtcaatggcctcaacaacaacaggtaccacagggtaccttgttgcagccacaccaaatagctcaacttgagttgatgacttccattgcactccgtaccctgccaatgatgtgcagtgtcaacgtgccggtgtacggcaccaccactagtgtgccattcggcgttggcacccaagttggtgcctac

SEQ ID NO: 18 - protein, 365 aa, Triticum aestivum
MKTFLIFALLAVAATSAIAQMETSHIPGLEKPSQQQPLPLQQILWYHQQQPIQQQPQPFPQQPPCSQQQQPPLSQQQQPPFSQQQPPFSQQELPILPQQPPFSQQQQPQFSQQQQPFPQQQQPLLLQQPPFSQQRPPFSQQQQQPVLPQQPPFSQQQQQQPILPQQPPFSQHQQPVLPQQQIPYVQPSILQQLNPCKVFLQQQCSPVAMPQSLARSQMLWQSSCHVMQQQCCQQLPRIPEQSRYDAIRAIIYSIVLQEQQHGQGFNQPQQQQPQQSVQGVSQPQQQQKQLGQCSFQRPQQQQLGQWPQQQQVPQGTLLQPHQIAQLELMTSIALRTLPMMCSVNVPVYGTTTSVPFGVGTQVGAY

SEQ ID NO: 19 - DNA, 1383 bp, Triticum aestivum
  CDS (1)..(1383)
atgaagtccacggtagtaagatcgccatggctagcgctagccctcgtcctctccctgtgcctctccctctcgttcgcgtcgtgggatgccgaggacgaaggtaggggtagtaggaggtggcaagaagggggcgacgaaaggcggtccggcgaaagtggccggccgtaccacttcggcgaggagagcttccgggagtgggccaagtcgcggcacggccacttcaagcccagccactacgacgccgacgagatcgccttcgtgagggaaggcgagggcgtgctggtgctgctgaggaacgggaagcgggagtcgttctgcgtcagggagggcgacgtgttcgtgatcccggccgggtccatcgtgtactccgccaacacgcaccgctccaagtggttccgggtcgtcatgctcctcaaccccgtctccacgccgggcagcttccaggagttctcccctattgggtttggaggcgagcagccgcagtcgttcttcagcgtattcagcgacgaggttatccgggcggcatttaacactcggcagcgggaggatgtggacagagtgttcgagacgaagagcagaggtgagggtcagatatctgaggggtcggaggagcagatacgggagctgagcaggtcgtgctccaggggaggacgcggcggtggcggcgggtcgggttccgagaaggaggacatccagccgcgcagcctcaccggcgagaagccccgctactcgaacaagcacggcaggttccaccagatcaccggcgaccagtgccaccacctccgcaagctcgacatggatgtcaccctcgtcaacattacccggggctcgatgacggcgctgaggtacaccacccggtcgaccaggatctacatcgtcgtggaggggcgcgacggctacttcgagatggcgtgcccgcacgtctccagctccggccgttctgaacgccgggagcacgagcaggagcgcgagcgcgaacacggacacggcaggagaagcgaggagcgcgggcaggagcacggcaggaggagcgaggaggaggagcacggccacggcggcgagcaggagaaatcgaggggctacaggcaggtgagggcccagatcaaggtggggtcggtgatcgtgctccccgcgggccacccggcgacgttcgtggccgggaacgaggggaacctcgccctgctgtccttcggcgtgggcgccaacaacgacgaggaggtgttcgtgaccggcgggaacagcgtgctgaagcagctggacgaggcagccaaggcgctggcgttcccccagcaggcgagggagctggcggacagggtcatccgcgcgcagccggagtccgtgttcgtccccggcccgcagcagcagcgccgcgtcgccgacatg

SEQ ID NO: 20 - protein, 461 aa, Triticum aestivum
MKSTVVRSPWLALALVLSLCLSLSFASWDAEDEGRGSRRWQEGGDERRSGESGRPYHFGEESFREWAKSRHGHFKPSHYDADEIAFVREGEGVLVLLRNGKRESFCVREGDVFVIPAGSIVYSANTHRSKWFRVVMLLNPVSTPGSFQEFSPIGFGGEQPQSFFSVFSDEVIRAAFNTRQREDVDRVFETKSRGEGQISEGSEEQIRELSRSCSRGGRGGGGGSGSEKEDIQPRSLTGEKPRYSNKHGRFHQITGDQCHHLRKLDMDVTLVNITRGSMTALRYTTRSTRIYIVVEGRDGYFEMACPHVSSSGRSERREHEQEREREHGHGRRSEERGQEHGRRSEEEEHGHGGEQEKSRGYRQVRAQIKVGSVIVLPAGHPATFVAGNEGNLALLSFGVGANNDEEVFVTGGNSVLKQLDEAAKALAFPQQARELADRVIRAQPESVFVPGPQQQRRVADM

SEQ ID NO: 21 - DNA, 1764 bp, Triticum aestivum
  CDS (1)..(1764)
atggcgaccagagccagagtaaccatccctctcctcttcctcctgggcacaagccttctcttcgccgcggctgtttcggcctcccatgacgaggaggaggacaggcgcggtgggcgctcgctgcagcagtgcgtgcagcggtgccagcaggaccggccgcggtactctcatgcccggtgcgtgcaggagtgccgggacgaccagcagcagcacggaaggcacgagcaggaggagcagggccgcgggcatggccggcacggcgagggggagcgtgaggaggagcagggccgtggccgtggccggcacggccagggagagcgtgaggaggagcagggccgtggacgtgggcggcgcggcgagggagagcgtgatgaggagcacggggatggccggcggccgtacgtgttcggcccgcgcagcttccgccgcatcatccggagcgaccacgggttcgtcaaggcccttcgcccgttcgacgaagtgtccaggctcctccggggcatcaggaactaccgtgtcgccatcatggaggtgaacccgcgcgcgttcgtcgtgccgggactcacggacgcggacggcgtcggctacgtcgctcaaggcgagggggtgctgacggtgatcgagaacggcgagaagcggtcctacaccgtcaggcaaggcgatgtgatcgtggcgccggcggggtccatcatgcacctggccaacaccgacggccggaggaagctggtcatcgccaagattctccacaccatctccgtccccggcaagttccagtatttctcggccaagcctctcctcgctagtttgagcaaacgcgtgctcacagcggcgttaaagacctcggatgagcggctgggtagtctcttgggcagccgccaaggcaaggaggaggaggagaagtccatctccatcgtccgcgcgtcagaggagcagctccgcgagctgcgtcgccaggcgtccgagggtgaccagggccaccactggcctctccccccgttccgcggcgactcgcgcgacaccttcaacctcctggagcagcgccccaagatcgccaaccgccatggccgcctctacgaggccgacgcccgtagcttccacgccctcgcccaacacgacgtccgcgtcgccgtggccaacatcacgccgggttctatgaccgcaccctacctgaacacccagtcgttcaagctcgccgttgtgctggaaggcgagggcgaggtggagatcgtctgcccgcacctcggccgcgacagcgagcgccgcgagcaagagcacggcaagggcaggtggaggagcgaggaagaggaggacgaccggcggcagcaacgccgacgcgggtccggctccgagtcggaggaggagcaggaccagcagaggtacgagacggtccgcgcgcgggtgtcgcgcggctcggcgttcgtggtgccccccggccacccggtggtggagatcgcctcgtcccgcggcagcagcaacctccaggtggtgtgcttcgagatcaacgccgagaggaacgagcgggtgtggctcgccgggaggaacaacgtgatcgccaagctggacgaccccgcccaggagctcaccttcggcaggcccgcgagggaggtgcaggaggtgttccgcgccaaggatcagcaggacgagggcttcgtcgccggacccgagcagcagcaggagcatgagcgcggggaccgccgccgtggtgaccgcgggcgcggcgacgaagccgtggaggcgttcctgaggatggcaaccgccgcgctc

SEQ ID NO: 22 - protein, 588 aa, Triticum aestivum
MATRARVTIPLLFLLGTSLLFAAAVSASHDEEEDRRGGRSLQQCVQRCQQDRPRYSHARCVQECRDDQQQHGRHEQEEQGRGHGRHGEGEREEEQGRGRGRHGQGEREEEQGRGRGRRGEGERDEEHGDGRRPYVFGPRSFRRIIRSDHGFVKALRPFDEVSRLLRGIRNYRVAIMEVNPRAFVVPGLTDADGVGYVAQGEGVLTVIENGEKRSYTVRQGDVIVAPAGSIMHLANTDGRRKLVIAKILHTISVPGKFQYFSAKPLLASLSKRVLTAALKTSDERLGSLLGSRQGKEEEEKSISIVRASEEQLRELRRQASEGDQGHHWPLPPFRGDSRDTFNLLEQRPKIANRHGRLYEADARSFHALAQHDVRVAVANITPGSMTAPYLNTQSFKLAVVLEGEGEVEIVCPHLGRDSERREQEHGKGRWRSEEEEDDRRQQRRRGSGSESEEEQDQQRYETVRARVSRGSAFVVPPGHPVVEIASSRGSSNLQVVCFEINAERNERVWLAGRNNVIAKLDDPAQELTFGRPAREVQEVFRAKDQQDEGFVAGPEQQQEHERGDRRRGDRGRGDEAVEAFLRMATAAL

SEQ ID NO: 23 - DNA, 1341 bp, Triticum aestivum
  CDS (1)..(1341)
atgggtaaggagaagactcacatcaacatcgtggtcattggccatgtcgactctggcaagtcgacgaccactggccacctgatctacaagcttggaggcattgacaagcgtgtcatcgagaggttcgagaaggaagccgctgagatgaacaagaggtctttcaagtacgcgtgggtgcttgacaagctcaaggccgagcgtgagagaggtatcaccatcgatattgctctctggaagttcgagaccaccaagtactactgcaccgtcattgatgcccctggtcaccgtgacttcatcaagaacatgatcaccggtacctcccaggctgactgtgctgttctcatcatcgactccaccactggtggttttgaggctggtatctccaaggatggccagacacgtgagcacgccctccttgctttcactcttggagtgaagcagatgatctgctgctgcaacaagatggacgccaccactcccaagtactcaaaggcgcgttatgaagaaattgtcaaggaggtctcttcctacctgaagaaggtcggctacaaccctgacaaggttcccttcgtccccatctctgggtttgagggtgacaacatgattgagaggtccaccaaccttgactggtacaagggcccaacccttcttgaggcgcttgaccagatcaacgagcccaagaggccctcagacaagcccctccgtcttcccctccaggacgtttacaagattggtggcattggaactgtgcctgttggccgtgttgagactggtgtcatcaagcctggtatggttgtcacctttggtcccactggtctgacaactgaggtcaagtccgttgagatgcaccatgagtctctcctggaggcgcttcctggtgacaacgttggcttcaatgtcaagaatgttgccgtgaaggatctgaagcgtggttttgttgcatccaactccaaggatgaccctgccaaggaggcagccaacttcacctcccaggtcatcatcatgaaccaccctggtcagattggcaacggctacgccccagtgctggactgccacacctcgcacattgctgtcaagtttgctgagctggtgaccaagatcgacaggcgatctggtaaggagctggaggccctgcccaagttcctcaagaatggtgatgctggcatagtgaagatgattcccaccaagcccatggttgtggagacctttgctacttacccacctcttggtcgttttgctgtccgtgacatgaggcaaactgtggctgttggtgtcatcaagggtgtggagaagaaggacccaaccggcgccaaggtgaccaaggctgccatcaagaagaaa

SEQ ID NO: 24 - protein, 447 aa, Triticum aestivum
MGKEKTHINIVVIGHVDSGKSTTTGHLIYKLGGIDKRVIERFEKEAAEMNKRSFKYAWVLDKLKAERERGITIDIALWKFETTKYYCTVIDAPGHRDFIKNMITGTSQADCAVLIIDSTTGGFEAGISKDGQTREHALLAFTLGVKQMICCCNKMDATTPKYSKARYEEIVKEVSSYLKKVGYNPDKVPFVPISGFEGDNMIERSTNLDWYKGPTLLEALDQINEPKRPSDKPLRLPLQDVYKIGGIGTVPVGRVETGVIKPGMVVTFGPTGLTTEVKSVEMHHESLLEALPGDNVGFNVKNVAVKDLKRGFVASNSKDDPAKEAANFTSQVIIMNHPGQIGNGYAPVLDCHTSHIAVKFAELVTKIDRRSGKELEALPKFLKNGDAGIVKMIPTKPMVVETFATYPPLGRFAVRDMRQTVAVGVIKGVEKKDPTGAKVTKAAIKKK

SEQ ID NO: 25 - DNA, 849 bp, Triticum aestivum
  CDS (1)..(849)
atgaagacctttctcatccttgccctccttgctatcgtggcgaccaccgccacaactgcagttagagttccagtgccacaattgcagccacaaaatccatctcagcaacagccacaagagcaagttccattggtacaacaacaacaatttctagggcagcaacaaccatttccaccacaacaaccatatccacagccgcaaccatttccatcacaacaaccatatctgcagctgcaaccatttccgcagccgcaactaccatattcgcagccacaaccatttcgaccacaacaaccatatccacaaccgcaaccacagtattcgcaaccacaacaaccaatttcacagcagcagcagcagcagcaacaacaacaacaacaacaaatccttcaacaaattctgcaacaacaactgattccatgcagggatgttgtcttgcaacaacacaacatagcgcatgcaagctcacaagtattgcaacaaagtagttaccaacagttgcaacaattatgttgtcagcaactgtttcagatccccgagcagtcgcggtgccaagccatccacaatgttgttcatgctattattctgcatcatcatcaacaacaacaacaacaaccgtcgagccaggtctcctaccagcagcctcaggaacaatatccatcaggccagggctccttccagtcatctcagcaaaacccacaggcccagggctctgtccagcctcaacaactgccccagttccaggaaataaggaacttagcgctgcagacgctgccagcaatgtgcaatgtctacatccctccatattgctcgaccaccattgcgccatttggcatcttcggtaccaac

SEQ ID NO: 26 - protein, 283 aa, Triticum aestivum
MKTFLILALLAIVATTATTAVRVPVPQLQPQNPSQQQPQEQVPLVQQQQFLGQQQPFPPQQPYPQPQPFPSQQPYLQLQPFPQPQLPYSQPQPFRPQQPYPQPQPQYSQPQQPISQQQQQQQQQQQQQILQQILQQQLIPCRDVVLQQHNIAHASSQVLQQSSYQQLQQLCCQQLFQIPEQSRCQAIHNVVHAIILHHHQQQQQQPSSQVSYQQPQEQYPSGQGSFQSSQQNPQAQGSVQPQQLPQFQEIRNLALQTLPAMCNVYIPPYCSTTIAPFGIFGTN

SEQ ID NO: 27 - DNA, 981 bp, Triticum aestivum
  CDS (1)..(981)
atgaagatcttcatggtctttgccctcctcgttgcatcaacgaccatcaccaccgcgaccgcacagctcgaccctcgcatccatgaccaagaaaggccacaacaatcgtttctgcaacagcaaccacttatccagcaacaaccatacccgcctcaagagccacaacaaccactattcccgcaaaaagagccacaacaaccatttccgctgcagcagccacaataccagcaacaacaaccgtatccacaacaaccacttccccaagaacaacttccccagcaacatttatttccgcagcagccgccacaacaacaatttccacaacagatgccacttccgcatcaacaacaaacattcccgcaacaacaacaacaacaacaacaacaagaacaactcccacaacaactcccacaattcccgcaacaacaaccattttcccaatatcaacaaccattaacacaacaaccatactcgcaagagcaaccattgccacaacaacaaccttctgtagaggaaaaacaacaattgaacttgtgcaaggagttcctcctgcagcagtgtaacccagaggagaaactgtcgttactccagtcagtgatcccgttcctccgaccaaagacctcgcaacagaacagctgccagttgaagcgactacaatgttgtcgacaacttgcacatatcagtgaaccgtcccgatgcccggccatccacaacattgtgcatgccatcgtcatgcaacaacaacatgtggatagaggtttcggccagcctcaaccacaacagttgggccaggaaatgcccatgcagcctcaacatcaattgggccagcactctatcctacctcaacaactagcccagtacaagttggttaggttacttgtgattcagacccttcctatgttatgcaacgtgcatgtcccgtctgattgctacaccattactgcaccatttggtagcatgactgcctacaatggtggacaa

SEQ ID NO: 28 - protein, 327 aa, Triticum aestivum
MKIFMVFALLVASTTITTATAQLDPRIHDQERPQQSFLQQQPLIQQQPYPPQEPQQPLFPQKEPQQPFPLQQPQYQQQQPYPQQPLPQEQLPQQHLFPQQPPQQQFPQQMPLPHQQQTFPQQQQQQQQQEQLPQQLPQFPQQQPFSQYQQPLTQQPYSQEQPLPQQQPSVEEKQQLNLCKEFLLQQCNPEEKLSLLQSVIPFLRPKTSQQNSCQLKRLQCCRQLAHISEPSRCPAIHNIVHAIVMQQQHVDRGFGQPQPQQLGQEMPMQPQHQLGQHSILPQQLAQYKLVRLLVIQTLPMLCNVHVPSDCYTITAPFGSMTAYNGGQ

SEQ ID NO: 29 - protein, 15 aa, Artificial Sequence
  epitope
QQILWYHQQQPIQQQ

SEQ ID NO: 30 - protein, 4 aa, Artificial Sequence
  epitope
QPIQ

SEQ ID NO: 31 - protein, 15 aa, Artificial Sequence
  epitope
  misc_feature (1)..(7): Xaa can be any naturally occurring amino acid
  misc_feature (10)..(10): Xaa can be any naturally occurring amino acid
XXXXXXXQQXPIQQQ

SEQ ID NO: 32 - protein, 15 aa, Artificial Sequence
  epitope
  misc_feature (1)..(8): Xaa can be any naturally occurring amino acid
  misc_feature (10)..(11): Xaa can be any naturally occurring amino acid
XXXXXXXXQXXIQQQ

SEQ ID NO: 33 - protein, 15 aa, Artificial Sequence
  epitope
  misc_feature (1)..(11): Xaa can be any naturally occurring amino acid
XXXXXXXXXXXIQQQ

SEQ ID NO: 34 - protein, 6 aa, Artificial Sequence
  epitope
QQPIQQ

SEQ ID NO: 35 - protein, 6 aa, Artificial Sequence
  epitope
  misc_feature (1)..(1): Xaa can be any naturally occurring amino acid
  misc_feature (3)..(3): Xaa can be any naturally occurring amino acid
XQXIQQ

SEQ ID NO: 36 - protein, 15 aa, Artificial Sequence
  epitope
  misc_feature (1)..(5): Xaa can be any naturally occurring amino acid
  misc_feature (7)..(7): Xaa can be any naturally occurring amino acid
  misc_feature (10)..(10): Xaa can be any naturally occurring amino acid
XXXXXYXQQXPIQQQ

SEQ ID NO: 37 - protein, 15 aa, Artificial Sequence
  epitope
  misc_feature (1)..(5): Xaa can be any naturally occurring amino acid
  misc_feature (7)..(7): Xaa can be any naturally occurring amino acid
  misc_feature (10)..(11): Xaa can be any naturally occurring amino acid
XXXXXYXQQXXIQQQ

SEQ ID NO: 38 - protein, 15 aa, Artificial Sequence
  epitope
  misc_feature (1)..(7): Xaa can be any naturally occurring amino acid
  misc_feature (9)..(11): Xaa can be any naturally occurring amino acid
  misc_feature (15)..(15): Xaa can be any naturally occurring amino acid
XXXXXXXQXXXIQQX

SEQ ID NO: 39 - protein, 8 aa, Artificial Sequence
  epitope
HQQQPIQQ

SEQ ID NO: 40 - protein, 7 aa, Artificial Sequence
  epitope
QQQPIQQ

SEQ ID NO: 41 - protein, 6 aa, Artificial Sequence
  epitope
QQQPIQ

SEQ ID NO: 42 - protein, 6 aa, Artificial Sequence
  epitope
  misc_feature (3)..(3): Xaa can be any naturally occurring amino acid
QQXPIQ

SEQ ID NO: 43 - protein, 6 aa, Artificial Sequence
  epitope
  misc_feature (3)..(4): Xaa can be any naturally occurring amino acid
QQXXIQ

SEQ ID NO: 44 - protein, 15 aa, Artificial Sequence
  epitope
  misc_feature (1)..(5): Xaa can be any naturally occurring amino acid
  misc_feature (7)..(7): Xaa can be any naturally occurring amino acid
  misc_feature (9)..(11): Xaa can be any naturally occurring amino acid
  misc_feature (15)..(15): Xaa can be any naturally occurring amino acid
XXXXXYXQXXXIQQX

SEQ ID NO: 45 - protein, 15 aa, Artificial Sequence
  epitope
  misc_feature (1)..(7): Xaa can be any naturally occurring amino acid
  misc_feature (9)..(11): Xaa can be any naturally occurring amino acid
  misc_feature (15)..(15): Xaa can be any naturally occurring amino acid
XXXXXXXQXXXIQQX

SEQ ID NO: 46 - protein, 7 aa, Artificial Sequence
  epitope
QQQPIQQ

SEQ ID NO: 47 - protein, 7 aa, Artificial Sequence
  epitope
  misc_feature (2)..(4): Xaa can be any naturally occurring amino acid
QXXXIQQ

SEQ ID NO: 48 - protein, 6 aa, Artificial Sequence
  epitope
QQPIQQ

SEQ ID NO: 49 - protein, 5 aa, Artificial Sequence
  epitope
QQPIQ

SEQ ID NO: 50 - protein, 15 aa, Artificial Sequence
  epitope
  misc_feature (2)..(4): Xaa can be any naturally occurring amino acid
  misc_feature (10)..(10): Xaa can be any naturally occurring amino acid
QXXXWYHQQXPIQQQ

SEQ ID NO: 51 - protein, 15 aa, Artificial Sequence
  epitope
  misc_feature (1)..(5): Xaa can be any naturally occurring amino acid
  misc_feature (10)..(10): Xaa can be any naturally occurring amino acid
XXXXXYHQQXPIQQQ

SEQ ID NO: 52 - protein, 15 aa, Artificial Sequence
  epitope
  misc_feature (1)..(5): Xaa can be any naturally occurring amino acid
  misc_feature (7)..(11): Xaa can be any naturally occurring amino acid
XXXXXYXXXXXIQQQ

SEQ ID NO: 53 - protein, 9 aa, Artificial Sequence
  epitope
YHQQQPIQQ

SEQ ID NO: 54 - protein, 8 aa, Artificial Sequence
  epitope
HQQQPIQQ

SEQ ID NO: 55 - protein, 8 aa, Artificial Sequence
  epitope
  misc_feature (4)..(4): Xaa can be any naturally occurring amino acid
HQQXPIQQ

SEQ ID NO: 56 - protein, 7 aa, Artificial Sequence
  epitope
QQQPIQQ

SEQ ID NO: 57 - protein, 5 aa, Artificial Sequence
  epitope
QPIQQ

SEQ ID NO: 58 - protein, 4 aa, Artificial Sequence
  epitope
PIQQ

SEQ ID NO: 59 - protein, 5 aa, Artificial Sequence
  epitope
QPIQQ

SEQ ID NO: 60 - protein, 6 aa, Artificial Sequence
  epitope
QQPIQQ

SEQ ID NO: 61 - protein, 4 aa, Artificial Sequence
  epitope
QPIQ

SEQ ID NO: 62 - protein, 15 aa, Artificial Sequence
  epitope
  misc_feature (1)..(5): Xaa can be any naturally occurring amino acid
  misc_feature (7)..(7): Xaa can be any naturally occurring amino acid
  misc_feature (9)..(11): Xaa can be any naturally occurring amino acid
  misc_feature (15)..(15): Xaa can be any naturally occurring amino acid
XXXXXYXQXXXIQQX

SEQ ID NO: 63 - protein, 7 aa, Artificial Sequence
  epitope
QQQPIQQ

SEQ ID NO: 64 - protein, 7 aa, Artificial Sequence
  epitope
  misc_feature (2)..(4): Xaa can be any naturally occurring amino acid
QXXXIQQ

SEQ ID NO: 65 - protein, 6 aa, Artificial Sequence
  epitope
QQQPIQ

SEQ ID NO: 66 - protein, 7 aa, Artificial Sequence
  epitope
QQQPIQQ

SEQ ID NO: 67 - protein, 7 aa, Artificial Sequence
  epitope
  misc_feature (2)..(3): Xaa can be any naturally occurring amino acid
QXXPIQQ

SEQ ID NO: 68 - protein, 7 aa, Artificial Sequence
  epitope
QQQPIQQ

SEQ ID NO: 69 - protein, 7 aa, Artificial Sequence
  epitope
  misc_feature (2)..(4): Xaa can be any naturally occurring amino acid
QXXXIQQ

SEQ ID NO: 70 - protein, 6 aa, Artificial Sequence
  epitope
QQQPIQ

SEQ ID NO: 71 - protein, 15 aa, Artificial Sequence
  epitope
  misc_feature (1)..(3): Xaa can be any naturally occurring amino acid
  misc_feature (5)..(5): Xaa can be any naturally occurring amino acid
  misc_feature (7)..(7): Xaa can be any naturally occurring amino acid
  misc_feature (9)..(10): Xaa can be any naturally occurring amino acid
  misc_feature (15)..(15): Xaa can be any naturally occurring amino acid
XXXLXYXQXXPIQQX

SEQ ID NO: 72 - protein, 15 aa, Artificial Sequence
  epitope
  misc_feature (1)..(7): Xaa can be any naturally occurring amino acid
  misc_feature (9)..(10): Xaa can be any naturally occurring amino acid
  misc_feature (15)..(15): Xaa can be any naturally occurring amino acid
XXXXXXXQXXPIQQX

SEQ ID NO: 73 - protein, 8 aa, Artificial Sequence
  epitope
HQQQPIQQ

SEQ ID NO: 74 - protein, 7 aa, Artificial Sequence
  epitope
QQQPIQQ

SEQ ID NO: 75 - protein, 6 aa, Artificial Sequence
  epitope
QQQPIQ

SEQ ID NO: 76 - protein, 6 aa, Artificial Sequence
  epitope
  misc_feature (2)..(3): Xaa can be any naturally occurring amino acid
QXXPIQ

SEQ ID NO: 77 - protein, 7 aa, Artificial Sequence
  epitope
QQQPIQQ

SEQ ID NO: 78 - protein, 7 aa, Artificial Sequence
  epitope
  misc_feature (2)..(3): Xaa can be any naturally occurring amino acid
QXXPIQQ

SEQ ID NO: 79 - protein, 6 aa, Artificial Sequence
  epitope
QQILWY

SEQ ID NO: 80 - protein, 7 aa, Artificial Sequence
  epitope
QQQPIQQ

SEQ ID NO: 81 - protein, 5 aa, Artificial Sequence
  epitope
QQPIQ

SEQ ID NO: 82 - protein, 7 aa, Artificial Sequence
  epitope
QQQPIQQ

SEQ ID NO: 83 - protein, 7 aa, Artificial Sequence
  epitope
  misc_feature (2)..(3): Xaa can be any naturally occurring amino acid
QXXPIQQ

SEQ ID NO: 84 - protein, 7 aa, Artificial Sequence
  epitope
  misc_feature (2)..(4): Xaa can be any naturally occurring amino acid
QXXXIQQ

SEQ ID NO: 85 - protein, 10 aa, Artificial Sequence
  epitope
QQILWYHQQQ

SEQ ID NO: 86 - protein, 7 aa, Artificial Sequence
  epitope
QQQPIQQ

SEQ ID NO: 87 - protein, 6 aa, Artificial Sequence
  epitope
QQQPIQ

SEQ ID NO: 88 - protein, 7 aa, Artificial Sequence
  epitope
QQILWYH

SEQ ID NO: 89 - protein, 5 aa, Artificial Sequence
  epitope
QQPIQ

SEQ ID NO: 90 - protein, 15 aa, Artificial Sequence
  epitope
  misc_feature (1)..(7): Xaa can be any naturally occurring amino acid
  misc_feature (9)..(10): Xaa can be any naturally occurring amino acid
  misc_feature (15)..(15): Xaa can be any naturally occurring amino acid
XXXXXXXQXXPIQQX

SEQ ID NO: 91 - protein, 5 aa, Artificial Sequence
  epitope
QPIQQ

SEQ ID NO: 92 - protein, 5 aa, Artificial Sequence
  epitope
  misc_feature (1)..(1): Xaa can be any naturally occurring amino acid
XPIQQ

SEQ ID NO: 93 - protein, 15 aa, Artificial Sequence
  epitope
  misc_feature (5)..(5): Xaa can be any naturally occurring amino acid
QQILXYHQQQPIQQQ

SEQ ID NO: 94 - protein, 15 aa, Artificial Sequence
  epitope
  misc_feature (4)..(5): Xaa can be any naturally occurring amino acid
  misc_feature (10)..(10): Xaa can be any naturally occurring amino acid
QQIXXYHQQXPIQQQ

SEQ ID NO: 95 - protein, 9 aa, Artificial Sequence
  epitope
YHQQQPIQQ

SEQ ID NO: 96 - protein, 9 aa, Artificial Sequence
  epitope
  misc_feature (5)..(5): Xaa can be any naturally occurring amino acid
YHQQXPIQQ

SEQ ID NO: 97 - protein, 15 aa, Artificial Sequence
  epitope
  misc_feature (1)..(5): Xaa can be any naturally occurring amino acid
  misc_feature (7)..(7): Xaa can be any naturally occurring amino acid
  misc_feature (10)..(11): Xaa can be any naturally occurring amino acid
XXXXXYXQQXXIQQQ

SEQ ID NO: 98 - protein, 15 aa, Artificial Sequence
  epitope
  misc_feature (1)..(5): Xaa can be any naturally occurring amino acid
  misc_feature (7)..(8): Xaa can be any naturally occurring amino acid
  misc_feature (10)..(11): Xaa can be any naturally occurring amino acid
  misc_feature (15)..(15): Xaa can be any naturally occurring amino acid
XXXXXYXXQXXIQQX

SEQ ID NO: 99 - protein, 9 aa, Artificial Sequence
  epitope
YHQQQPIQQ

SEQ ID NO: 100 - protein, 7 aa, Artificial Sequence
  epitope
QQQPIQQ

SEQ ID NO: 101 - protein, 7 aa, Artificial Sequence
  epitope
  misc_feature (3)..(4): Xaa can be any naturally occurring amino acid
QQXXIQQ

SEQ ID NO: 102 - protein, 7 aa, Artificial Sequence
  epitope
  misc_feature (1)..(1): Xaa can be any naturally occurring amino acid
  misc_feature (3)..(4): Xaa can be any naturally occurring amino acid
XQXXIQQ

SEQ ID NO: 103 - protein, 7 aa, Artificial Sequence
  epitope
QQILWYH

SEQ ID NO: 104 - protein, 6 aa, Artificial Sequence
  epitope
QQQPIQ

SEQ ID NO: 105 - protein, 5 aa, Artificial Sequence
  epitope
QQQPI

SEQ ID NO: 106 - protein, 15 aa, Artificial Sequence
  epitope
  misc_feature (1)..(7): Xaa can be any naturally occurring amino acid
  misc_feature (10)..(10): Xaa can be any naturally occurring amino acid
  misc_feature (15)..(15): Xaa can be any naturally occurring amino acid
XXXXXXXQQXPIQQX

SEQ ID NO: 107 - protein, 5 aa, Artificial Sequence
  epitope
QILWY

SEQ ID NO: 108 - protein, 8 aa, Artificial Sequence
  epitope
HQQQPIQQ

SEQ ID NO: 109 - protein, 6 aa, Artificial Sequence
  epitope
QQQPIQ

SEQ ID NO: 110 - protein, 6 aa, Artificial Sequence
  epitope
  misc_feature (3)..(3): Xaa can be any naturally occurring amino acid
QQXPIQ

SEQ ID NO: 111 - protein, 6 aa, Artificial Sequence
  epitope
  misc_feature (2)..(3): Xaa can be any naturally occurring amino acid
  misc_feature (5)..(5): Xaa can be any naturally occurring amino acid
QXXPXQ

SEQ ID NO: 112 - protein, 15 aa, Artificial Sequence
  epitope
  misc_feature (1)..(7): Xaa can be any naturally occurring amino acid
  misc_feature (9)..(10): Xaa can be any naturally occurring amino acid
  misc_feature (15)..(15): Xaa can be any naturally occurring amino acid
XXXXXXXQXXPIQQX

SEQ ID NO: 113 - protein, 7 aa, Artificial Sequence
  epitope
QQQPIQQ

SEQ ID NO: 114 - protein, 6 aa, Artificial Sequence
  epitope
QQQPIQ

SEQ ID NO: 115 - protein, 6 aa, Artificial Sequence
  epitope
  misc_feature (2)..(3): Xaa can be any naturally occurring amino acid
QXXPIQ

SEQ ID NO: 116 - protein, 15 aa, Artificial Sequence
  epitope
  misc_feature (1)..(6): Xaa can be any naturally occurring amino acid
  misc_feature (8)..(10): Xaa can be any naturally occurring amino acid
  misc_feature (15)..(15): Xaa can be any naturally occurring amino acid
XXXXXXHXXXPIQQX

SEQ ID NO: 117 - protein, 10 aa, Artificial Sequence
  epitope
QQILWYHQQQ

SEQ ID NO: 118 - protein, 7 aa, Artificial Sequence
  epitope
QQQPIQQ

SEQ ID NO: 119 - protein, 7 aa, Artificial Sequence
  epitope
  misc_feature (1)..(3): Xaa can be any naturally occurring amino acid
XXXPIQQ

SEQ ID NO: 120 - protein, 5 aa, Artificial Sequence
  epitope
QQPIQ

SEQ ID NO: 121 - protein, 10 aa, Artificial Sequence
  epitope
YHQQQPIQQQ

SEQ ID NO: 122 - protein, 15 aa, Artificial Sequence
  epitope
  misc_feature (1)..(7): Xaa can be any naturally occurring amino acid
  misc_feature (9)..(11): Xaa can be any naturally occurring amino acid
  misc_feature (15)..(15): Xaa can be any naturally occurring amino acid
XXXXXXXQXXXIQQX

SEQ ID NO: 123 - protein, 5 aa, Artificial Sequence
  epitope
QPIQQ

SEQ ID NO: 124 - protein, 4 aa, Artificial Sequence
  epitope
QPIQ

SEQ ID NO: 125 - protein, 15 aa, Artificial Sequence
  epitope
  misc_feature (1)..(2): Xaa can be any naturally occurring amino acid
  misc_feature (7)..(7): Xaa can be any naturally occurring amino acid
XXILWYXQQQPIQQQ

SEQ ID NO: 126 - protein, 15 aa, Artificial Sequence
  epitope
  misc_feature (1)..(2): Xaa can be any naturally occurring amino acid
  misc_feature (5)..(5): Xaa can be any naturally occurring amino acid
  misc_feature (7)..(7): Xaa can be any naturally occurring amino acid
XXILXYXQQQPIQQQ

SEQ ID NO: 127 - protein, 15 aa, Artificial Sequence
  epitope
  misc_feature (1)..(5): Xaa can be any naturally occurring amino acid
  misc_feature (7)..(7): Xaa can be any naturally occurring amino acid
XXXXXYXQQQPIQQQ

SEQ ID NO: 128 - protein, 7 aa, Artificial Sequence
  epitope
YHQQQPI

SEQ ID NO: 129 - protein, 6 aa, Artificial Sequence
  epitope
YHQQQP

SEQ ID NO: 130 - protein, 6 aa, Artificial Sequence
  epitope
  misc_feature (2)..(2): Xaa can be any naturally occurring amino acid
YXQQQP

SEQ ID NO: 131 - protein, 15 aa, Artificial Sequence
  epitope
PPFPQQHQQFPQQQI

SEQ ID NO: 132 - protein, 15 aa, Artificial Sequence
  epitope
  misc_feature (1)..(7): Xaa can be any naturally occurring amino acid
  misc_feature (10)..(10): Xaa can be any naturally occurring amino acid
XXXXXXXQQXPQQQI

SEQ ID NO: 133 - protein, 8 aa, Artificial Sequence
  epitope
QQFPQQQI

SEQ ID NO: 134 - protein, 15 aa, Artificial Sequence
  epitope
  misc_feature (1)..(10): Xaa can be any naturally occurring amino acid
XXXXXXXXXXPQQQI

SEQ ID NO: 135 - protein, 15 aa, Artificial Sequence
  epitope
  misc_feature (1)..(11): Xaa can be any naturally occurring amino acid
XXXXXXXXXXXQQQI

SEQ ID NO: 136 - protein, 15 aa, Artificial Sequence
  epitope
  misc_feature (1)..(7): Xaa can be any naturally occurring amino acid
  misc_feature (9)..(10): Xaa can be any naturally occurring amino acid
  misc_feature (15)..(15): Xaa can be any naturally occurring amino acid
XXXXXXXQXXPQQQX

SEQ ID NO: 137 - protein, 7 aa, Artificial Sequence
  epitope
FPQQHQQ

SEQ ID NO: 138 - protein, 4 aa, Artificial Sequence
  epitope
AAAA

SEQ ID NO: 139 - protein, 15 aa, Artificial Sequence
  epitope
  misc_feature (1)..(5): Xaa can be any naturally occurring amino acid
  misc_feature (7)..(7): Xaa can be any naturally occurring amino acid
XXXXXQXQQFPQQQI

SEQ ID NO: 140 - protein, 15 aa, Artificial Sequence
  epitope
  misc_feature (1)..(7): Xaa can be any naturally occurring amino acid
  misc_feature (9)..(11): Xaa can be any naturally occurring amino acid
XXXXXXXQXXXQQQI

SEQ ID NO: 141 - protein, 15 aa, Artificial Sequence
  epitope
  misc_feature (1)..(11): Xaa can be any naturally occurring amino acid
XXXXXXXXXXXQQQI

SEQ ID NO: 142 - protein, 6 aa, Artificial Sequence
  epitope
FPQQHQ

SEQ ID NO: 143 - protein, 8 aa, Artificial Sequence
  epitope
QQFPQQQI

SEQ ID NO: 144 - protein, 8 aa, Artificial Sequence
  epitope
  misc_feature (2)..(4): Xaa can be any naturally occurring amino acid
QXXXQQQI

SEQ ID NO: 145 - protein, 8 aa, Artificial Sequence
  epitope
  misc_feature (1)..(4): Xaa can be any naturally occurring amino acid
XXXXQQQI

SEQ ID NO: 146 - protein, 15 aa, Artificial Sequence
  epitope
  misc_feature (1)..(7): Xaa can be any naturally occurring amino acid
  misc_feature (9)..(11): Xaa can be any naturally occurring amino acid
XXXXXXXQXXXQQQI

SEQ ID NO: 147 - protein, 10 aa, Artificial Sequence
  epitope
PFPQQHQQFP

SEQ ID NO: 148 - protein, 15 aa, Artificial Sequence
  epitope
  misc_feature (1)..(7): Xaa can be any naturally occurring amino acid
  misc_feature (9)..(11): Xaa can be any naturally occurring amino acid
XXXXXXXQXXXQQQI

SEQ ID NO: 149 - protein, 7 aa, Artificial Sequence
  epitope
FPQQHQQ

SEQ ID NO: 150 - protein, 15 aa, Artificial Sequence
  epitope
  misc_feature (1)..(6): Xaa can be any naturally occurring amino acid
  misc_feature (9)..(10): Xaa can be any naturally occurring amino acid
  misc_feature (15)..(15): Xaa can be any naturally occurring amino acid
XXXXXXHQXXPQQQX

SEQ ID NO: 151 - protein, 8 aa, Artificial Sequence
  epitope
FPQQHQQF

SEQ ID NO: 152 - protein, 7 aa, Artificial Sequence
  epitope
FPQQHQQ

SEQ ID NO: 153 - protein, 15 aa, Artificial Sequence
  epitope
  misc_feature (1)..(7): Xaa can be any naturally occurring amino acid
  misc_feature (9)..(10): Xaa can be any naturally occurring amino acid
XXXXXXXQXXPQQQI

SEQ ID NO: 154 - protein, 15 aa, Artificial Sequence
  epitope
  misc_feature (1)..(7): Xaa can be any naturally occurring amino acid
  misc_feature (9)..(11): Xaa can be any naturally occurring amino acid
XXXXXXXQXXXQQQI

SEQ ID NO: 155 - protein, 15 aa, Artificial Sequence
  epitope
  misc_feature (1)..(11): Xaa can be any naturally occurring amino acid
XXXXXXXXXXXQQQI

SEQ ID NO: 156 - protein, 10 aa, Artificial Sequence
  epitope
PPFPQQHQQF

SEQ ID NO: 157 - protein, 8 aa, Artificial Sequence
  epitope
FPQQHQQF

SEQ ID NO: 158 - protein, 8 aa, Artificial Sequence
  epitope
QQFPQQQI

SEQ ID NO: 159 - protein, 5 aa, Artificial Sequence
  epitope
FPQQQ

SEQ ID NO: 160 - protein, 6 aa, Artificial Sequence
  epitope
  misc_feature (1)..(2): Xaa can be any naturally occurring amino acid
XXQQQI

SEQ ID NO: 161 - protein, 15 aa, Artificial Sequence
  epitope
  misc_feature (1)..(7): Xaa can be any naturally occurring amino acid
  misc_feature (9)..(10): Xaa can be any naturally occurring amino acid
XXXXXXXQXXPQQQI

SEQ ID NO: 162 - protein, 15 aa, Artificial Sequence
  epitope
  misc_feature (1)..(7): Xaa can be any naturally occurring amino acid
  misc_feature (9)..(11): Xaa can be any naturally occurring amino acid
XXXXXXXQXXXQQQI

SEQ ID NO: 163 - protein, 15 aa, Artificial Sequence
  epitope
  misc_feature (1)..(7): Xaa can be any naturally occurring amino acid
  misc_feature (9)..(10): Xaa can be any naturally occurring amino acid
XXXXXXXQXXPQQQI

SEQ ID NO: 164 - protein, 7 aa, Artificial Sequence
  epitope
FPQQHQQ

SEQ ID NO: 165 - protein, 15 aa, Artificial Sequence
  epitope
  misc_feature (1)..(10): Xaa can be any naturally occurring amino acid
XXXXXXXXXXPQQQI

SEQ ID NO: 166 - protein, 7 aa, Artificial Sequence
  epitope
FPQQHQQ

SEQ ID NO: 167 - protein, 15 aa, Artificial Sequence
  epitope
  misc_feature (1)..(6): Xaa can be any naturally occurring amino acid
  misc_feature (9)..(10): Xaa can be any naturally occurring amino acid
XXXXXXHQXXPQQQI

SEQ ID NO: 168 - protein, 15 aa, Artificial Sequence
  epitope
  misc_feature (1)..(7): Xaa can be any naturally occurring amino acid
  misc_feature (9)..(10): Xaa can be any naturally occurring amino acid
XXXXXXXQXXPQQQI

SEQ ID NO: 169 - protein, 8 aa, Artificial Sequence
  epitope
FPQQHQQF

SEQ ID NO: 170 - protein, 15 aa, Artificial Sequence
  epitope
  misc_feature (1)..(7): Xaa can be any naturally occurring amino acid
  misc_feature (9)..(11): Xaa can be any naturally occurring amino acid
XXXXXXXQXXXQQQI

SEQ ID NO: 171 - protein, 8 aa, Artificial Sequence
  epitope
PPFPQQHQ

SEQ ID NO: 172 - protein, 8 aa, Artificial Sequence
  epitope
QQFPQQQI

SEQ ID NO: 173 - protein, 8 aa, Artificial Sequence
  epitope
  misc_feature (2)..(4): Xaa can be any naturally occurring amino acid
QXXXQQQI

SEQ ID NO: 174 - protein, 15 aa, Artificial Sequence
  epitope
  misc_feature (1)..(7): Xaa can be any naturally occurring amino acid
  misc_feature (9)..(11): Xaa can be any naturally occurring amino acid
XXXXXXXQXXXQQQI

SEQ ID NO: 175 - protein, 15 aa, Artificial Sequence
  epitope
  misc_feature (1)..(4): Xaa can be any naturally occurring amino acid
  misc_feature (10)..(10): Xaa can be any naturally occurring amino acid
  misc_feature (15)..(15): Xaa can be any naturally occurring amino acid
XXXXQQHQQXPQQQX

SEQ ID NO: 176 - protein, 15 aa, Artificial Sequence
  epitope
  misc_feature (1)..(7): Xaa can be any naturally occurring amino acid
  misc_feature (9)..(10): Xaa can be any naturally occurring amino acid
  misc_feature (15)..(15): Xaa can be any naturally occurring amino acid
XXXXXXXQXXPQQQX

SEQ ID NO: 177 - protein, 9 aa, Artificial Sequence
  epitope
PPFPQQHQQ

SEQ ID NO: 178 - protein, 9 aa, Artificial Sequence
  epitope
  misc_feature (1)..(4): Xaa can be any naturally occurring amino acid
XXXXQQHQQ

SEQ ID NO: 179 - protein, 15 aa, Artificial Sequence
  epitope
  misc_feature (1)..(7): Xaa can be any naturally occurring amino acid
  misc_feature (9)..(10): Xaa can be any naturally occurring amino acid
  misc_feature (15)..(15): Xaa can be any naturally occurring amino acid
XXXXXXXQXXPQQQX

SEQ ID NO: 180 - protein, 9 aa, Artificial Sequence
  epitope
FPQQHQQFP

SEQ ID NO: 181 - protein, 8 aa, Artificial Sequence
  epitope
FPQQHQQF

SEQ ID NO: 182 - protein, 8 aa, Artificial Sequence
  epitope
QQFPQQQI

SEQ ID NO: 183 - protein, 15 aa, Artificial Sequence
  epitope
  misc_feature (1)..(1): Xaa can be any naturally occurring amino acid
  misc_feature (3)..(4): Xaa can be any naturally occurring amino acid
  misc_feature (10)..(10): Xaa can be any naturally occurring amino acid
XPXXQQHQQXPQQQI

SEQ ID NO: 184 - protein, 15 aa, Artificial Sequence
  epitope
  misc_feature (1)..(4): Xaa can be any naturally occurring amino acid
  misc_feature (9)..(10): Xaa can be any naturally occurring amino acid
XXXXQQHQXXPQQQI

SEQ ID NO: 185 - protein, 9 aa, Artificial Sequence
  epitope
PPFPQQHQQ

SEQ ID NO: 186 - protein, 9 aa, Artificial Sequence
  epitope
  misc_feature (1)..(1): Xaa can be any naturally occurring amino acid
  misc_feature (3)..(4): Xaa can be any naturally occurring amino acid
XPXXQQHQQ

SEQ ID NO: 187 - protein, 9 aa, Artificial Sequence
  epitope
  misc_feature (1)..(4): Xaa can be any naturally occurring amino acid
  misc_feature (9)..(9): Xaa can be any naturally occurring amino acid
XXXXQQHQX

SEQ ID NO: 188 - protein, 10 aa, Artificial Sequence
  epitope
QHQQFPQQQI

SEQ ID NO: 189 - protein, 10 aa, Artificial Sequence
  epitope
  misc_feature (5)..(5): Xaa can be any naturally occurring amino acid
QHQQXPQQQI

SEQ ID NO: 190 - protein, 10 aa, Artificial Sequence
  epitope
  misc_feature (1)..(2): Xaa can be any naturally occurring amino acid
  misc_feature (4)..(6): Xaa can be any naturally occurring amino acid
XXQXXXQQQI

SEQ ID NO: 191 - protein, 15 aa, Artificial Sequence
  epitope
SQQQQPFPQQQQPLL

SEQ ID NO: 192 - protein, 15 aa, Artificial Sequence
  epitope
  misc_feature (1)..(2): Xaa can be any naturally occurring amino acid
  misc_feature (6)..(6): Xaa can be any naturally occurring amino acid
  misc_feature (12)..(12): Xaa can be any naturally occurring amino acid
  misc_feature (14)..(15): Xaa can be any naturally occurring amino acid
XXQQQXFPQQQXPXX

SEQ ID NO: 193 - protein, 15 aa, Artificial Sequence
  epitope
  misc_feature (1)..(3): Xaa can be any naturally occurring amino acid
  misc_feature (6)..(6): Xaa can be any naturally occurring amino acid
  misc_feature (12)..(15): Xaa can be any naturally occurring amino acid
XXXQQXFPQQQXXXX

SEQ ID NO: 194 - protein, 10 aa, Artificial Sequence
  epitope
QQQQPFPQQQ

SEQ ID NO: 195 - protein, 8 aa, Artificial Sequence
  epitope
QQPFPQQQ

SEQ ID NO: 196 - protein, 6 aa, Artificial Sequence
  epitope
QPFPQQ

SEQ ID NO: 197 - protein, 6 aa, Artificial Sequence
  epitope
  misc_feature (2)..(2): Xaa can be any naturally occurring amino acid
QXFPQQ

SEQ ID NO: 198 - protein, 6 aa, Artificial Sequence
  epitope
  misc_feature (2)..(3): Xaa can be any naturally occurring amino acid
QXXPQQ

SEQ ID NO: 199 - protein, 15 aa, Artificial Sequence
  epitope
  misc_feature (1)..(1): Xaa can be any naturally occurring amino acid
  misc_feature (14)..(15): Xaa can be any naturally occurring amino acid
XQQQQPFPQQQQPXX

SEQ ID NO: 200 - protein, 10 aa, Artificial Sequence
  epitope
QQQQPFPQQQ

SEQ ID NO: 201 - protein, 10 aa, Artificial Sequence
  epitope
  misc_feature (1)..(2): Xaa can be any naturally occurring amino acid
  misc_feature (5)..(5): Xaa can be any naturally occurring amino acid
  misc_feature (7)..(7): Xaa can be any naturally occurring amino acid
XXQQXFXQQQ

SEQ ID NO: 202 - protein, 15 aa, Artificial Sequence
  epitope
  misc_feature (1)..(3): Xaa can be any naturally occurring amino acid
  misc_feature (6)..(6): Xaa can be any naturally occurring amino acid
  misc_feature (12)..(15): Xaa can be any naturally occurring amino acid
XXXQQXFPQQQXXXX

SEQ ID NO: 203 - protein, 15 aa, Artificial Sequence
  epitope
  misc_feature (1)..(3): Xaa can be any naturally occurring amino acid
  misc_feature (6)..(7): Xaa can be any naturally occurring amino acid
  misc_feature (11)..(15): Xaa can be any naturally occurring amino acid
XXXQQXXPQQXXXXX

SEQ ID NO: 204 - protein, 7 aa, Artificial Sequence
  epitope
QQPFPQQ

SEQ ID NO: 205 - protein, 6 aa, Artificial Sequence
  epitope
QPFPQQ

SEQ ID NO: 206 - protein, 6 aa, Artificial Sequence
  epitope
  misc_feature (2)..(2): Xaa can be any naturally occurring amino acid
QXFPQQ

SEQ ID NO: 207 - protein, 6 aa, Artificial Sequence
  epitope
  misc_feature (2)..(3): Xaa can be any naturally occurring amino acid
QXXPQQ

SEQ ID NO: 208 - protein, 15 aa, Artificial Sequence
  epitope
  misc_feature (1)..(1): Xaa can be any naturally occurring amino acid
  misc_feature (6)..(7): Xaa can be any naturally occurring amino acid
  misc_feature (12)..(14): Xaa can be any naturally occurring amino acid
XQQQQXXPQQQXXXL

SEQ ID NO: 209 - protein, 10 aa, Artificial Sequence
  epitope
QQQQPFPQQQ

SEQ ID NO: 210 - protein, 10 aa, Artificial Sequence
  epitope
  misc_feature (5)..(6): Xaa can be any naturally occurring amino acid
QQQQXXPQQQ

SEQ ID NO: 211 - protein, 10 aa, Artificial Sequence
  epitope
QPFPQQQQPL

SEQ ID NO: 212 - protein, 9 aa, Artificial Sequence
  epitope
QPFPQQQQP

SEQ ID NO: 213 - protein, 9 aa, Artificial Sequence
  epitope
  misc_feature (2)..(3): Xaa can be any naturally occurring amino acid
  misc_feature (8)..(9): Xaa can be any naturally occurring amino acid
QXXPQQQXX

SEQ ID NO: 214 - protein, 15 aa, Artificial Sequence
  epitope
  misc_feature (1)..(1): Xaa can be any naturally occurring amino acid
  misc_feature (6)..(6): Xaa can be any naturally occurring amino acid
  misc_feature (12)..(15): Xaa can be any naturally occurring amino acid
XQQQQXFPQQQXXXX

SEQ ID NO: 215 - protein, 15 aa, Artificial Sequence
  epitope
  misc_feature (1)..(2): Xaa can be any naturally occurring amino acid
  misc_feature (6)..(6): Xaa can be any naturally occurring amino acid
  misc_feature (11)..(15): Xaa can be any naturally occurring amino acid
XXQQQXFPQQXXXXX

SEQ ID NO: 216 - protein, 15 aa, Artificial Sequence
  epitope
  misc_feature (1)..(3): Xaa can be any naturally occurring amino acid
  misc_feature (6)..(6): Xaa can be any naturally occurring amino acid
  misc_feature (8)..(8): Xaa can be any naturally occurring amino acid
  misc_feature (11)..(15): Xaa can be any naturally occurring amino acid
XXXQQXFXQQXXXXX

SEQ ID NO: 217 - protein, 8 aa, Artificial Sequence
  epitope
QQPFPQQQ

SEQ ID NO: 218 - protein, 7 aa, Artificial Sequence
  epitope
QQPFPQQ

SEQ ID NO: 219 - protein, 6 aa, Artificial Sequence
  epitope
QPFPQQ

SEQ ID NO: 220 - protein, 15 aa, Artificial Sequence
  epitope
  misc_feature (1)..(3): Xaa can be any naturally occurring amino acid
  misc_feature (6)..(7): Xaa can be any naturally occurring amino acid
  misc_feature (12)..(15): Xaa can be any naturally occurring amino acid
XXXQQXXPQQQXXXX

SEQ ID NO: 221 - protein, 8 aa, Artificial Sequence
  epitope
QQPFPQQQ

SEQ ID NO: 222 - protein, 4 aa, Artificial Sequence
  epitope
QQPF

SEQ ID NO: 223 - protein, 10 aa, Artificial Sequence
  epitope
QQQQPFPQQQ

SEQ ID NO: 224 - protein, 7 aa, Artificial Sequence
  epitope
QPFPQQQ

SEQ ID NO: 225 - protein, 10 aa, Artificial Sequence
  epitope
QQPFPQQQQP

SEQ ID NO: 226 - protein, 10 aa, Artificial Sequence
  epitope
  misc_feature (1)..(1): Xaa can be any naturally occurring amino acid
  misc_feature (3)..(4): Xaa can be any naturally occurring amino acid
  misc_feature (9)..(9): Xaa can be any naturally occurring amino acid
XQXXPQQQXP

SEQ ID NO: 227 - protein, 4 aa, Artificial Sequence
  epitope
AAAA

SEQ ID NO: 228 - protein, 7 aa, Artificial Sequence
  epitope
QPFPQQQ

SEQ ID NO: 229 - protein, 4 aa, Artificial Sequence
  epitope
QPFP

SEQ ID NO: 230 - protein, 15 aa, Artificial Sequence
  epitope
  misc_feature (1)..(3): Xaa can be any naturally occurring amino acid
  misc_feature (7)..(7): Xaa can be any naturally occurring amino acid
XXXQQPXPQQQQPLL

SEQ ID NO: 231 - protein, 10 aa, Artificial Sequence
  epitope
QQPFPQQQQP

SEQ ID NO: 232 - protein, 7 aa, Artificial Sequence
  epitope
QPFPQQQ

SEQ ID NO: 233 - protein, 7 aa, Artificial Sequence
  epitope
  misc_feature (3)..(3): Xaa can be any naturally occurring amino acid
QPXPQQQ

SEQ ID NO: 234 - protein, 15 aa, Artificial Sequence
  epitope
  misc_feature (2)..(2): Xaa can be any naturally occurring amino acid
  misc_feature (4)..(4): Xaa can be any naturally occurring amino acid
  misc_feature (7)..(7): Xaa can be any naturally occurring amino acid
  misc_feature (10)..(10): Xaa can be any naturally occurring amino acid
  misc_feature (12)..(12): Xaa can be any naturally occurring amino acid
SXQXQPXPQXQXPLL

SEQ ID NO: 235 - protein, 15 aa, Artificial Sequence
  epitope
  misc_feature (1)..(5): Xaa can be any naturally occurring amino acid
  misc_feature (7)..(7): Xaa can be any naturally occurring amino acid
  misc_feature (10)..(10): Xaa can be any naturally occurring amino acid
  misc_feature (12)..(12): Xaa can be any naturally occurring amino acid
  misc_feature (14)..(15): Xaa can be any naturally occurring amino acid
XXXXXPXPQXQXPXX

SEQ ID NO: 236 - protein, 9 aa, Artificial Sequence
  epitope
QPFPQQQQP

SEQ ID NO: 237 - protein, 7 aa, Artificial Sequence
  epitope
QPFPQQQ

SEQ ID NO: 238 - protein, 4 aa, Artificial Sequence
  epitope
PFPQ

SEQ ID NO: 239 - protein, 15 aa, Artificial Sequence
  epitope
  misc_feature (1)..(1): Xaa can be any naturally occurring amino acid
  misc_feature (4)..(4): Xaa can be any naturally occurring amino acid
  misc_feature (6)..(7): Xaa can be any naturally occurring amino acid
  misc_feature (14)..(15): Xaa can be any naturally occurring amino acid
XQQXQXXPQQQQPXX

SEQ ID NO: 240 - protein, 15 aa, Artificial Sequence
  epitope
  misc_feature (1)..(7): Xaa can be any naturally occurring amino acid
  misc_feature (13)..(15): Xaa can be any naturally occurring amino acid
XXXXXXXPQQQQXXX

SEQ ID NO: 241 - protein, 10 aa, Artificial Sequence
  epitope
QQQQPFPQQQ

SEQ ID NO: 242 - protein, 8 aa, Artificial Sequence
  epitope
QQPFPQQQ

SEQ ID NO: 243 - protein, 5 aa, Artificial Sequence
  epitope
QQPFP

SEQ ID NO: 244 - protein, 9 aa, Artificial Sequence
  epitope
QQQPLLLQQ

SEQ ID NO: 245 - protein, 9 aa, Artificial Sequence
  epitope
  misc_feature (4)..(6): Xaa can be any naturally occurring amino acid
QQQXXXLQQ

SEQ ID NO: 246 - protein, 7 aa, Artificial Sequence
  epitope
QQPFPQQ

SEQ ID NO: 247 - protein, 7 aa, Artificial Sequence
  epitope
QPFPQQQ

SEQ ID NO: 248 - protein, 6 aa, Artificial Sequence
  epitope
QPFPQQ

SEQ ID NO: 249 - protein, 15 aa, Artificial Sequence
  epitope
  misc_feature (1)..(1): Xaa can be any naturally occurring amino acid
  misc_feature (6)..(6): Xaa can be any naturally occurring amino acid
  misc_feature (11)..(15): Xaa can be any naturally occurring amino acid
XQQQQXFPQQXXXXX

SEQ ID NO: 250 - protein, 15 aa, Artificial Sequence
  epitope
  misc_feature (1)..(2): Xaa can be any naturally occurring amino acid
  misc_feature (5)..(6): Xaa can be any naturally occurring amino acid
  misc_feature (11)..(15): Xaa can be any naturally occurring amino acid
XXQQXXFPQQXXXXX

SEQ ID NO: 251 - protein, 7 aa, Artificial Sequence
  epitope
QQPFPQQ

SEQ ID NO: 252 - protein, 7 aa, Artificial Sequence
  epitope
  misc_feature (3)..(3): Xaa can be any naturally occurring amino acid
QQXFPQQ

SEQ ID NO: 253 - protein, 7 aa, Artificial Sequence
  epitope
  misc_feature (2)..(3): Xaa can be any naturally occurring amino acid
QXXFPQQ

SEQ ID NO: 254 - protein, 15 aa, Artificial Sequence
  epitope
  misc_feature (4)..(4): Xaa can be any naturally occurring amino acid
  misc_feature (7)..(7): Xaa can be any naturally occurring amino acid
  misc_feature (14)..(15): Xaa can be any naturally occurring amino acid
SQQXQPXPQQQQPXX

SEQ ID NO: 255 - protein, 8 aa, Artificial Sequence
  epitope
QQPFPQQQ

SEQ ID NO: 256 - protein, 7 aa, Artificial Sequence
  epitope
QPFPQQQ

SEQ ID NO: 257 - protein, 7 aa, Artificial Sequence
  epitope
  misc_feature (3)..(3): Xaa can be any naturally occurring amino acid
QPXPQQQ

SEQ ID NO: 258 - protein, 4 aa, Artificial Sequence
  epitope
FPQQ

SEQ ID NO: 259 - protein, 4 aa, Artificial Sequence
  epitope
AAAA

SEQ ID NO: 260 - protein, 15 aa, Artificial Sequence
  epitope
  misc_feature (1)..(1): Xaa can be any naturally occurring amino acid
  misc_feature (6)..(7): Xaa can be any naturally occurring amino acid
XQQQQXXPQQQQPLL

SEQ ID NO: 261 - protein, 15 aa, Artificial Sequence
  epitope
  misc_feature (1)..(4): Xaa can be any naturally occurring amino acid
  misc_feature (6)..(7): Xaa can be any naturally occurring amino acid
XXXXQXXPQQQQPLL

SEQ ID NO: 262 - protein, 9 aa, Artificial Sequence
  epitope
QPFPQQQQP

SEQ ID NO: 263 - protein, 7 aa, Artificial Sequence
  epitope
QPFPQQQ

SEQ ID NO: 264 - protein, 15 aa, Artificial Sequence
  epitope
  misc_feature (1)..(4): Xaa can be any naturally occurring amino acid
  misc_feature (6)..(6): Xaa can be any naturally occurring amino acid
XXXXQXFPQQQQPLL

SEQ ID NO: 265 - protein, 15 aa, Artificial Sequence
  epitope
  misc_feature (1)..(7): Xaa can be any naturally occurring amino acid
XXXXXXXPQQQQPLL

SEQ ID NO: 266 - protein, 15 aa, Artificial Sequence
  epitope
  misc_feature (1)..(9): Xaa can be any naturally occurring amino acid
  misc_feature (14)..(15): Xaa can be any naturally occurring amino acid
XXXXXXXXXQQQPXX

SEQ ID NO: 267 - protein, 8 aa, Artificial Sequence
  epitope
QQPFPQQQ

SEQ ID NO: 268 - protein, 15 aa, Artificial Sequence
  epitope
  misc_feature (1)..(2): Xaa can be any naturally occurring amino acid
  misc_feature (6)..(6): Xaa can be any naturally occurring amino acid
  misc_feature (12)..(15): Xaa can be any naturally occurring amino acid
XXQQQXFPQQQXXXX

SEQ ID NO: 269 - protein, 4 aa, Artificial Sequence
  epitope
AAAA

SEQ ID NO: 270 - protein, 8 aa, Artificial Sequence
  epitope
QQPFPQQQ

SEQ ID NO: 271 - protein, 7 aa, Artificial Sequence
  epitope
QPFPQQQ

SEQ ID NO: 272 - protein, 4 aa, Artificial Sequence
  epitope
QPFP

SEQ ID NO: 273 - protein, 4 aa, Artificial Sequence
  epitope
AAAA

SEQ ID NO: 274 - protein, 7 aa, Artificial Sequence
  epitope
QPFPQQQ

SEQ ID NO: 275 - protein, 15 aa, Artificial Sequence
  epitope
  misc_feature (1)..(6): Xaa can be any naturally occurring amino acid
  misc_feature (14)..(14): Xaa can be any naturally occurring amino acid
XXXXXXFPQQQQPXL

SEQ ID NO: 276 - protein, 15 aa, Artificial Sequence
  epitope
  misc_feature (1)..(7): Xaa can be any naturally occurring amino acid
  misc_feature (10)..(11): Xaa can be any naturally occurring amino acid
  misc_feature (14)..(14): Xaa can be any naturally occurring amino acid
XXXXXXXPQXXQPXL

SEQ ID NO: 277 - protein, 8 aa, Artificial Sequence
  epitope
QQPFPQQQ

SEQ ID NO: 278 - protein, 7 aa, Artificial Sequence
  epitope
QPFPQQQ

SEQ ID NO: 279 - protein, 7 aa, Artificial Sequence
  epitope
QQPFPQQ

SEQ ID NO: 280 - protein, 15 aa, Artificial Sequence
  epitope
  misc_feature (1)..(1): Xaa can be any naturally occurring amino acid
  misc_feature (3)..(4): Xaa can be any naturally occurring amino acid
  misc_feature (9)..(9): Xaa can be any naturally occurring amino acid
  misc_feature (11)..(15): Xaa can be any naturally occurring amino acid
XQXXQPFPXQXXXXX

SEQ ID NO: 281 - protein, 15 aa, Artificial Sequence
  epitope
QQPQQPFPQQQQPLI

SEQ ID NO: 282 - protein, 15 aa, Artificial Sequence
  epitope
  misc_feature (6)..(7): Xaa can be any naturally occurring amino acid
  misc_feature (11)..(15): Xaa can be any naturally occurring amino acid
QQPQQXXPQQXXXXX

SEQ ID NO: 283 - protein, 15 aa, Artificial Sequence
  epitope
  misc_feature (2)..(2): Xaa can be any naturally occurring amino acid
  misc_feature (6)..(7): Xaa can be any naturally occurring amino acid
  misc_feature (11)..(15): Xaa can be any naturally occurring amino acid
QXPQQXXPQQXXXXX

SEQ ID NO: 284 - protein, 15 aa, Artificial Sequence
  epitope
  misc_feature (2)..(3): Xaa can be any naturally occurring amino acid
  misc_feature (6)..(7): Xaa can be any naturally occurring amino acid
  misc_feature (11)..(15): Xaa can be any naturally occurring amino acid
QXXQQXXPQQXXXXX

SEQ ID NO: 285 - protein, 9 aa, Artificial Sequence
  epitope
QPFPQQQQP

SEQ ID NO: 286 - protein, 8 aa, Artificial Sequence
  epitope
QPFPQQQQ

SEQ ID NO: 287 - protein, 7 aa, Artificial Sequence
  epitope
QPFPQQQ

SEQ ID NO: 288 - protein, 7 aa, Artificial Sequence
  epitope
  misc_feature (2)..(3): Xaa can be any naturally occurring amino acid
  misc_feature (7)..(7): Xaa can be any naturally occurring amino acid
QXXPQQX

SEQ ID NO: 289 - protein, 15 aa, Artificial Sequence
  epitope
  misc_feature (1)..(2): Xaa can be any naturally occurring amino acid
  misc_feature (6)..(6): Xaa can be any naturally occurring amino acid
  misc_feature (11)..(15): Xaa can be any naturally occurring amino acid
XXPQQXFPQQXXXXX

SEQ ID NO: 290 - protein, 8 aa, Artificial Sequence
  epitope
QQPFPQQQ

SEQ ID NO: 291 - protein, 6 aa, Artificial Sequence
  epitope
QPFPQQ

SEQ ID NO: 292 - protein, 6 aa, Artificial Sequence
  epitope
  misc_feature (2)..(2): Xaa can be any naturally occurring amino acid
QXFPQQ

SEQ ID NO: 293 - protein, 8 aa, Artificial Sequence
  epitope
QPQQPQQP

SEQ ID NO: 294 - protein, 5 aa, Artificial Sequence
  epitope
QPQQP

SEQ ID NO: 295 - protein, 10 aa, Artificial Sequence
  epitope
QPFPQQQQPL

SEQ ID NO: 296 - protein, 9 aa, Artificial Sequence
  epitope
QPFPQQQQP

SEQ ID NO: 297 - protein, 7 aa, Artificial Sequence
  epitope
QPFPQQQ

SEQ ID NO: 298 - protein, 15 aa, Artificial Sequence
  epitope
  misc_feature (1)..(3): Xaa can be any naturally occurring amino acid
  misc_feature (6)..(7): Xaa can be any naturally occurring amino acid
  misc_feature (12)..(15): Xaa can be any naturally occurring amino acid
XXXQQXXPQQQXXXX

SEQ ID NO: 299 - protein, 7 aa, Artificial Sequence
  epitope
QPFPQQQ

SEQ ID NO: 300 - protein, 15 aa, Artificial Sequence
  epitope
  misc_feature (1)..(2): Xaa can be any naturally occurring amino acid
  misc_feature (6)..(7): Xaa can be any naturally occurring amino acid
  misc_feature (12)..(15): Xaa can be any naturally occurring amino acid
XXPQQXXPQQQXXXX

SEQ ID NO: 301 - protein, 8 aa, Artificial Sequence
  epitope
QPFPQQQQ

SEQ ID NO: 302 - protein, 6 aa, Artificial Sequence
  epitope
PFPQQQ

SEQ ID NO: 303 - protein, 7 aa, Artificial Sequence
  epitope
  misc_feature (1)..(2): Xaa can be any naturally occurring amino acid
  misc_feature (7)..(7): Xaa can be any naturally occurring amino acid
XXPQQQX

SEQ ID NO: 304 - protein, 15 aa, Artificial Sequence
  epitope
  misc_feature (1)..(1): Xaa can be any naturally occurring amino acid
  misc_feature (6)..(7): Xaa can be any naturally occurring amino acid
  misc_feature (11)..(13): Xaa can be any naturally occurring amino acid
XQPQQXXPQQXXXLI

SEQ ID NO: 305 - protein, 15 aa, Artificial Sequence
  epitope
  misc_feature (1)..(1): Xaa can be any naturally occurring amino acid
  misc_feature (6)..(7): Xaa can be any naturally occurring amino acid
  misc_feature (11)..(15): Xaa can be any naturally occurring amino acid
XQPQQXXPQQXXXXX

SEQ ID NO: 306 - protein, 8 aa, Artificial Sequence
  epitope
QPFPQQQQ

SEQ ID NO: 307 - protein, 7 aa, Artificial Sequence
  epitope
QQPFPQQ

SEQ ID NO: 308 - protein, 6 aa, Artificial Sequence
  epitope
QPFPQQ

SEQ ID NO: 309 - protein, 15 aa, Artificial Sequence
  epitope
  misc_feature (1)..(1): Xaa can be any naturally occurring amino acid
  misc_feature (6)..(7): Xaa can be any naturally occurring amino acid
  misc_feature (9)..(9): Xaa can be any naturally occurring amino acid
  misc_feature (12)..(12): Xaa can be any naturally occurring amino acid
  misc_feature (14)..(15): Xaa can be any naturally occurring amino acid
XQPQQXXPXQQXPXX

SEQ ID NO: 310 - protein, 9 aa, Artificial Sequence
  epitope
QPFPQQQQP

SEQ ID NO: 311 - protein, 7 aa, Artificial Sequence
  epitope
QPFPQQQ

SEQ ID NO: 312 - protein, 15 aa, Artificial Sequence
  epitope
  misc_feature (1)..(2): Xaa can be any naturally occurring amino acid
  misc_feature (6)..(8): Xaa can be any naturally occurring amino acid
  misc_feature (11)..(15): Xaa can be any naturally occurring amino acid
XXPQQXXXQQXXXXX

SEQ ID NO: 313 - protein, 10 aa, Artificial Sequence
  epitope
QQPQQPFPQQ

SEQ ID NO: 314 - protein, 9 aa, Artificial Sequence
  epitope
QQPFPQQQQ

SEQ ID NO: 315 - protein, 6 aa, Artificial Sequence
  epitope
QPFPQQ

SEQ ID NO: 316 - protein, 15 aa, Artificial Sequence
  epitope
  misc_feature (1)..(2): Xaa can be any naturally occurring amino acid
  misc_feature (6)..(9): Xaa can be any naturally occurring amino acid
  misc_feature (11)..(15): Xaa can be any naturally occurring amino acid
XXPQQXXXXQXXXXX

SEQ ID NO: 317 - protein, 7 aa, Artificial Sequence
  epitope
QPFPQQQ

SEQ ID NO: 318 - protein, 6 aa, Artificial Sequence
  epitope
QPFPQQ

SEQ ID NO: 319 - protein, 15 aa, Artificial Sequence
  epitope
  misc_feature (14)..(15): Xaa can be any naturally occurring amino acid
QQPQQPFPQQQQPXX

SEQ ID NO: 320 - protein, 8 aa, Artificial Sequence
  epitope
QPFPQQQQ

SEQ ID NO: 321 - protein, 7 aa, Artificial Sequence
  epitope
QPFPQQQ

SEQ ID NO: 322 - protein, 15 aa, Artificial Sequence
  epitope
  misc_feature (1)..(2): Xaa can be any naturally occurring amino acid
  misc_feature (6)..(7): Xaa can be any naturally occurring amino acid
  misc_feature (12)..(15): Xaa can be any naturally occurring amino acid
XXPQQXXPQQQXXXX

SEQ ID NO: 323 - protein, 8 aa, Artificial Sequence
  epitope
QPFPQQQQ

SEQ ID NO: 324 - protein, 15 aa, Artificial Sequence
  epitope
  misc_feature (1)..(4): Xaa can be any naturally occurring amino acid
  misc_feature (6)..(7): Xaa can be any naturally occurring amino acid
  misc_feature (12)..(15): Xaa can be any naturally occurring amino acid
XXXXQXXPQQQXXXX

SEQ ID NO: 325 - protein, 7 aa, Artificial Sequence
  epitope
QPFPQQQ

SEQ ID NO: 326 - protein, 6 aa, Artificial Sequence
  epitope
QPFPQQ

SEQ ID NO: 327 - protein, 5 aa, Artificial Sequence
  epitope
PFPQQ

SEQ ID NO: 328 - protein, 15 aa, Artificial Sequence
  epitope
  misc_feature (1)..(4): Xaa can be any naturally occurring amino acid
  misc_feature (6)..(7): Xaa can be any naturally occurring amino acid
  misc_feature (12)..(15): Xaa can be any naturally occurring amino acid
XXXXQXXPQQQXXXX

SEQ ID NO: 329 - protein, 10 aa, Artificial Sequence
  epitope
QPQQPFPQQQ

SEQ ID NO: 330 - protein, 9 aa, Artificial Sequence
  epitope
QPFPQQQQP

SEQ ID NO: 331 - protein, 7 aa, Artificial Sequence
  epitope
QPFPQQQ

SEQ ID NO: 332 - protein, 15 aa, Artificial Sequence
  epitope
  misc_feature (1)..(3): Xaa can be any naturally occurring amino acid
  misc_feature (6)..(6): Xaa can be any naturally occurring amino acid
  misc_feature (8)..(8): Xaa can be any naturally occurring amino acid
  misc_feature (12)..(15): Xaa can be any naturally occurring amino acid
XXXQQXFXQQQXXXX

SEQ ID NO: 333 - protein, 10 aa, Artificial Sequence
  epitope
PQQPFPQQQQ

SEQ ID NO: 334 - protein, 7 aa, Artificial Sequence
  epitope
PQQPFPQ

SEQ ID NO: 335 - protein, 9 aa, Artificial Sequence
  epitope
FPQQQQPLI

SEQ ID NO: 336 - protein, 15 aa, Artificial Sequence
  epitope
  misc_feature (1)..(2): Xaa can be any naturally occurring amino acid
  misc_feature (6)..(6): Xaa can be any naturally occurring amino acid
  misc_feature (10)..(15): Xaa can be any naturally occurring amino acid
XXPQQXFPQXXXXXX

SEQ ID NO: 337 - protein, 15 aa, Artificial Sequence
  epitope
  misc_feature (1)..(3): Xaa can be any naturally occurring amino acid
  misc_feature (6)..(6): Xaa can be any naturally occurring amino acid
  misc_feature (10)..(15): Xaa can be any naturally occurring amino acid
XXXQQXFPQXXXXXX

SEQ ID NO: 338 - protein, 7 aa, Artificial Sequence
  epitope
QPFPQQQ

SEQ ID NO: 339 - protein, 6 aa, Artificial Sequence
  epitope
QPFPQQ

SEQ ID NO: 340 - protein, 10 aa, Artificial Sequence
  epitope
QQPFPQQQQP

SEQ ID NO: 341 - protein, 7 aa, Artificial Sequence
  epitope
QPFPQQQ

SEQ ID NO: 342 - protein, 4 aa, Artificial Sequence
  epitope
AAAA

SEQ ID NO: 343 - protein, 7 aa, Artificial Sequence
  epitope
QPQQPFP

SEQ ID NO: 344 - protein, 7 aa, Artificial Sequence
  epitope
  misc_feature (2)..(3): Xaa can be any naturally occurring amino acid
  misc_feature (7)..(7): Xaa can be any naturally occurring amino acid
QXXQPFX

SEQ ID NO: 345 - protein, 4 aa, Artificial Sequence
  epitope
QPFP

SEQ ID NO: 346 - protein, 15 aa, Artificial Sequence
  epitope
PQQSFPQQQRPFIQP

SEQ ID NO: 347 - protein, 9 aa, Artificial Sequence
  epitope
QSFPQQQRP

SEQ ID NO: 348 - protein, 8 aa, Artificial Sequence
  epitope
QSFPQQQR

SEQ ID NO: 349 - protein, 8 aa, Artificial Sequence
  epitope
QQSFPQQQ

SEQ ID NO: 350 - protein, 6 aa, Artificial Sequence
  epitope
QSFPQQ

SEQ ID NO: 351 - protein, 5 aa, Artificial Sequence
  epitope
RPFIQ

SEQ ID NO: 352 - protein, 8 aa, Artificial Sequence
  epitope
QSFPQQQR

SEQ ID NO: 353 - protein, 7 aa, Artificial Sequence
  epitope
QSFPQQQ

SEQ ID NO: 354 - protein, 9 aa, Artificial Sequence
  epitope
QQQRPFIQP

SEQ ID NO: 355 - protein, 7 aa, Artificial Sequence
  epitope
SFPQQQR

SEQ ID NO: 356 - protein, 6 aa, Artificial Sequence
  epitope
SFPQQQ

SEQ ID NO: 357 - protein, 7 aa, Artificial Sequence
  epitope
QSFPQQQ

SEQ ID NO: 358 - protein, 6 aa, Artificial Sequence
  epitope
SFPQQQ

SEQ ID NO: 359 - protein, 9 aa, Artificial Sequence
  epitope
QQQRPFIQP

SEQ ID NO: 360 - protein, 6 aa, Artificial Sequence
  epitope
RPFIQP

SEQ ID NO: 361 - protein, 7 aa, Artificial Sequence
  epitope
QSFPQQQ

SEQ ID NO: 362 - protein, 6 aa, Artificial Sequence
  epitope
RPFIQP

SEQ ID NO: 363 - protein, 9 aa, Artificial Sequence
  epitope
QSFPQQQRP

SEQ ID NO: 364 - protein, 7 aa, Artificial Sequence
  epitope
QSFPQQQ

SEQ ID NO: 365 - protein, 6 aa, Artificial Sequence
  epitope
SFPQQQ

SEQ ID NO: 366 - protein, 6 aa, Artificial Sequence
  epitope
RPFIQP

SEQ ID NO: 367 - protein, 9 aa, Artificial Sequence
  epitope
QSFPQQQRP

SEQ ID NO: 368 - protein, 6 aa, Artificial Sequence
  epitope
QSFPQQ

SEQ ID NO: 369 - protein, 10 aa, Artificial Sequence
  epitope
QPQQSFPQQQ

SEQ ID NO: 370 - protein, 10 aa, Artificial Sequence
  epitope
  misc_feature (2)..(3): Xaa can be any naturally occurring amino acid
  misc_feature (5)..(7): Xaa can be any naturally occurring amino acid
QXXQXXXQQQ

SEQ ID NO: 371 - protein, 7 aa, Artificial Sequence
  epitope
QSFPQQQ

SEQ ID NO: 372 - protein, 6 aa, Artificial Sequence
  epitope
QSFPQQ

SEQ ID NO: 373 - protein, 10 aa, Artificial Sequence
  epitope
QSFPQQQRPF

SEQ ID NO: 374 - protein, 10 aa, Artificial Sequence
  epitope
QQSFPQQQRP

SEQ ID NO: 375 - protein, 7 aa, Artificial Sequence
  epitope
QSFPQQQ

SEQ ID NO: 376 - protein, 6 aa, Artificial Sequence
  epitope
RPFIQP

SEQ ID NO: 377 - protein, 8 aa, Artificial Sequence
  epitope
QSFPQQQR

SEQ ID NO: 378 - protein, 7 aa, Artificial Sequence
  epitope
QSFPQQQ

SEQ ID NO: 379 - protein, 10 aa, Artificial Sequence
  epitope
QQSFPQQQRP

SEQ ID NO: 380 - protein, 7 aa, Artificial Sequence
  epitope
QSFPQQQ

SEQ ID NO: 381 - protein, 4 aa, Artificial Sequence
  epitope
QSFP

SEQ ID NO: 382 - protein, 15 aa, Artificial Sequence
  epitope
  misc_feature (1)..(2): Xaa can be any naturally occurring amino acid
  misc_feature (4)..(6): Xaa can be any naturally occurring amino acid
  misc_feature (11)..(15): Xaa can be any naturally occurring amino acid
XXQXXXQQQRXXXXX

SEQ ID NO: 383 - protein, 9 aa, Artificial Sequence
  epitope
QSFPQQQRP

SEQ ID NO: 384 - protein, 8 aa, Artificial Sequence
  epitope
QSFPQQQR

SEQ ID NO: 385 - protein, 8 aa, Artificial Sequence
  epitope
  misc_feature (2)..(4): Xaa can be any naturally occurring amino acid
QXXXQQQR

SEQ ID NO: 386 - protein, 10 aa, Artificial Sequence
  epitope
PQQQRPFIQP

SEQ ID NO: 387 - protein, 10 aa, Artificial Sequence
  epitope
RPFIQPSLQQ

SEQ ID NO: 388 - protein, 9 aa, Artificial Sequence
  epitope
RPFIQPSLQ

SEQ ID NO: 389 - protein, 6 aa, Artificial Sequence
  epitope
RPFIQP

SEQ ID NO: 390 - protein, 15 aa, Artificial Sequence
  epitope
  misc_feature (1)..(2): Xaa can be any naturally occurring amino acid
  misc_feature (4)..(6): Xaa can be any naturally occurring amino acid
  misc_feature (10)..(10): Xaa can be any naturally occurring amino acid
  misc_feature (12)..(15): Xaa can be any naturally occurring amino acid
XXQXXXQQQXPXXXX

SEQ ID NO: 391 - protein, 10 aa, Artificial Sequence
  epitope
PQQSFPQQQR

SEQ ID NO: 392 - protein, 10 aa, Artificial Sequence
  epitope
PQQQRPFIQP

SEQ ID NO: 393 - protein, 10 aa, Artificial Sequence
  epitope
  misc_feature (1)..(1): Xaa can be any naturally occurring amino acid
  misc_feature (5)..(5): Xaa can be any naturally occurring amino acid
  misc_feature (7)..(10): Xaa can be any naturally occurring amino acid
XQQQXPXXXX

SEQ ID NO: 394 - protein, 4 aa, Artificial Sequence
  epitope
QSFP

SEQ ID NO: 395 - protein, 7 aa, Artificial Sequence
  epitope
RPFIQPS

SEQ ID NO: 396 - protein, 7 aa, Artificial Sequence
  epitope
QSFPQQQ

SEQ ID NO: 397 - protein, 4 aa, Artificial Sequence
  epitope
QSFP

SEQ ID NO: 398 - protein, 5 aa, Artificial Sequence
  epitope
RPFIQ

SEQ ID NO: 399 - protein, 4 aa, Artificial Sequence
  epitope
AAAA

SEQ ID NO: 400 - protein, 4 aa, Artificial Sequence
  epitope
QSFP

SEQ ID NO: 401 - protein, 9 aa, Artificial Sequence
  epitope
PQQQRPFIQ

SEQ ID NO: 402 - protein, 8 aa, Artificial Sequence
  epitope
QQQRPFIQ

SEQ ID NO: 403 - protein, 4 aa, Artificial Sequence
  epitope
QSFP

SEQ ID NO: 404 - protein, 7 aa, Artificial Sequence
  epitope
QSFPQQQ

SEQ ID NO: 405 - protein, 6 aa, Artificial Sequence
  epitope
QSFPQQ

SEQ ID NO: 406 - protein, 9 aa, Artificial Sequence
  epitope
QSFPQQQRP

SEQ ID NO: 407 - protein, 7 aa, Artificial Sequence
  epitope
QSFPQQQ

SEQ ID NO: 408 - protein, 5 aa, Artificial Sequence
  epitope
QQSFP

SEQ ID NO: 409 - protein, 6 aa, Artificial Sequence
  epitope
RPFIQP

SEQ ID NO: 410 - protein, 5 aa, Artificial Sequence
  epitope
SFPQQ

SEQ ID NO: 411 - protein, 8 aa, Artificial Sequence
  epitope
QSFPQQQR

SEQ ID NO: 412 - protein, 5 aa, Artificial Sequence
  epitope
RPFIQ

SEQ ID NO: 413 - protein, 4 aa, Artificial Sequence
  epitope
RPFI

SEQ ID NO: 414 - protein, 15 aa, Artificial Sequence
  epitope
KWRAVLKIGATEPSQ

SEQ ID NO: 415 - protein, 10 aa, Artificial Sequence
  epitope
RAVLKIGATE

SEQ ID NO: 416 - protein, 6 aa, Artificial Sequence
  epitope
ATEPSQ

SEQ ID NO: 417 - protein, 15 aa, Artificial Sequence
  epitope
  misc_feature (2)..(2): Xaa can be any naturally occurring amino acid
  misc_feature (4)..(6): Xaa can be any naturally occurring amino acid
KXRXXXKIGATEPSQ

SEQ ID NO: 418 - protein, 15 aa, Artificial Sequence
  epitope
  misc_feature (1)..(8): Xaa can be any naturally occurring amino acid
  misc_feature (11)..(11): Xaa can be any naturally occurring amino acid
XXXXXXXXGAXEPSQ

SEQ ID NO: 419 - protein, 8 aa, Artificial Sequence
  epitope
KIGATEPS

SEQ ID NO: 420 - protein, 8 aa, Artificial Sequence
  epitope
  misc_feature (1)..(2): Xaa can be any naturally occurring amino acid
  misc_feature (5)..(5): Xaa can be any naturally occurring amino acid
XXGAXEPS

SEQ ID NO: 421 - protein, 9 aa, Artificial Sequence
  epitope
WRAVLKIGA

SEQ ID NO: 422 - protein, 7 aa, Artificial Sequence
  epitope
RAVLKIG

SEQ ID NO: 423 - protein, 15 aa, Artificial Sequence
  epitope
  misc_feature (1)..(6): Xaa can be any naturally occurring amino acid
  misc_feature (8)..(10): Xaa can be any naturally occurring amino acid
  misc_feature (12)..(12): Xaa can be any naturally occurring amino acid
XXXXXXKXXXTXPSQ

SEQ ID NO: 424 - protein, 5 aa, Artificial Sequence
  epitope
IGATE

SEQ ID NO: 425 - protein, 15 aa, Artificial Sequence
  epitope
  misc_feature (1)..(2): Xaa can be any naturally occurring amino acid
  misc_feature (4)..(6): Xaa can be any naturally occurring amino acid
  misc_feature (12)..(12): Xaa can be any naturally occurring amino acid
XXRXXXKIGATXPSQ

SEQ ID NO: 426 - protein, 6 aa, Artificial Sequence
  epitope
AVLKIG

SEQ ID NO: 427 - protein, 9 aa, Artificial Sequence
  epitope
WRAVLKIGA

SEQ ID NO: 428 - protein, 5 aa, Artificial Sequence
  epitope
WRAVL

SEQ ID NO: 429 - protein, 4 aa, Artificial Sequence
  epitope
RAVL

SEQ ID NO: 430 - protein, 9 aa, Artificial Sequence
  epitope
KIGATEPSQ

SEQ ID NO: 431 - protein, 6 aa, Artificial Sequence
  epitope
ATEPSQ

SEQ ID NO: 432 - protein, 8 aa, Artificial Sequence
  epitope
RAVLKIGA

SEQ ID NO: 433 - protein, 10 aa, Artificial Sequence
  epitope
VLKIGATEPS

SEQ ID NO: 434 - protein, 7 aa, Artificial Sequence
  epitope
IGATEPS

SEQ ID NO: 435 - protein, 15 aa, Artificial Sequence
  epitope
  misc_feature (1)..(6): Xaa can be any naturally occurring amino acid
  misc_feature (8)..(9): Xaa can be any naturally occurring amino acid
  misc_feature (11)..(12): Xaa can be any naturally occurring amino acid
XXXXXXKXXAXXPSQ

SEQ ID NO: 436 - protein, 7 aa, Artificial Sequence
  epitope
KIGATEP

SEQ ID NO: 437 - protein, 9 aa, Artificial Sequence
  epitope
KIGATEPSQ

SEQ ID NO: 438 - protein, 9 aa, Artificial Sequence
  epitope
  misc_feature (2)..(3): Xaa can be any naturally occurring amino acid
  misc_feature (5)..(6): Xaa can be any naturally occurring amino acid
  misc_feature (8)..(8): Xaa can be any naturally occurring amino acid
KXXAXXPXQ

SEQ ID NO: 439 - protein, 15 aa, Artificial Sequence
  epitope
  misc_feature (1)..(6): Xaa can be any naturally occurring amino acid
  misc_feature (8)..(8): Xaa can be any naturally occurring amino acid
  misc_feature (11)..(11): Xaa can be any naturally occurring amino acid
  misc_feature (13)..(14): Xaa can be any naturally occurring amino acid
XXXXXXKXGAXEXXQ

SEQ ID NO: 440 - protein, 6 aa, Artificial Sequence
  epitope
KIGATE

SEQ ID NO: 441 - protein, 6 aa, Artificial Sequence
  epitope
  misc_feature (2)..(2): Xaa can be any naturally occurring amino acid
  misc_feature (5)..(5): Xaa can be any naturally occurring amino acid
KXGAXE

SEQ ID NO: 442 - protein, 15 aa, Artificial Sequence
  epitope
  misc_feature (4)..(12): Xaa can be any naturally occurring amino acid
KWRXXXXXXXXXPSQ

SEQ ID NO: 443 - protein, 10 aa, Artificial Sequence
  epitope
KWRAVLKIGA

SEQ ID NO: 444 - protein, 8 aa, Artificial Sequence
  epitope
WRAVLKIG

SEQ ID NO: 445 - protein, 4 aa, Artificial Sequence
  epitope
RAVL

SEQ ID NO: 446 - protein, 8 aa, Artificial Sequence
  epitope
IGATEPSQ

SEQ ID NO: 447 - protein, 5 aa, Artificial Sequence
  epitope
ATEPS

SEQ ID NO: 448 - protein, 15 aa, Artificial Sequence
  epitope
  misc_feature (5)..(6): Xaa can be any naturally occurring amino acid
  misc_feature (8)..(10): Xaa can be any naturally occurring amino acid
KWRAXXKXXXTEPSQ

SEQ ID NO: 449 - protein, 15 aa, Artificial Sequence
  epitope
  misc_feature (2)..(2): Xaa can be any naturally occurring amino acid
  misc_feature (4)..(6): Xaa can be any naturally occurring amino acid
  misc_feature (8)..(11): Xaa can be any naturally occurring amino acid
KXRXXXKXXXXEPSQ

SEQ ID NO: 450 - protein, 10 aa, Artificial Sequence
  epitope
AKWRAVLKIG

SEQ ID NO: 451 - protein, 10 aa, Artificial Sequence
  epitope
  misc_feature (6)..(7): Xaa can be any naturally occurring amino acid
  misc_feature (9)..(10): Xaa can be any naturally occurring amino acid
AKWRAXXKXX

SEQ ID NO: 452 - protein, 10 aa, Artificial Sequence
  epitope
  misc_feature (3)..(3): Xaa can be any naturally occurring amino acid
  misc_feature (5)..(7): Xaa can be any naturally occurring amino acid
  misc_feature (9)..(10): Xaa can be any naturally occurring amino acid
AKXRXXXKXX

SEQ ID NO: 453 - protein, 4 aa, Artificial Sequence
  epitope
VLKI

SEQ ID NO: 454 - protein, 15 aa, Artificial Sequence
  epitope
  misc_feature (1)..(6): Xaa can be any naturally occurring amino acid
  misc_feature (8)..(9): Xaa can be any naturally occurring amino acid
  misc_feature (11)..(11): Xaa can be any naturally occurring amino acid
XXXXXXKXXAXEPSQ

SEQ ID NO: 455 - protein, 8 aa, Artificial Sequence
  epitope
KIGATEPS

SEQ ID NO: 456 - protein, 7 aa, Artificial Sequence
  epitope
KIGATEP

SEQ ID NO: 457 - protein, 5 aa, Artificial Sequence
  epitope
IGATE

SEQ ID NO: 458 - protein, 15 aa, Artificial Sequence
  epitope
  misc_feature (2)..(6): Xaa can be any naturally occurring amino acid
  misc_feature (8)..(8): Xaa can be any naturally occurring amino acid
  misc_feature (10)..(12): Xaa can be any naturally occurring amino acid
KXXXXXKXGXXXPSQ

SEQ ID NO: 459 - protein, 10 aa, Artificial Sequence
  epitope
WRAVLKIGAT

SEQ ID NO: 460 - protein, 8 aa, Artificial Sequence
  epitope
RAVLKIGA

SEQ ID NO: 461 - protein, 7 aa, Artificial Sequence
  epitope
GATEPSQ

SEQ ID NO: 462 - protein, 7 aa, Artificial Sequence
  epitope
  misc_feature (2)..(4): Xaa can be any naturally occurring amino acid
GXXXPSQ

SEQ ID NO: 463 - protein, 6 aa, Artificial Sequence
  epitope
GATEPS

SEQ ID NO: 464 - protein, 8 aa, Artificial Sequence
  epitope
KIGATEPS

SEQ ID NO: 465 - protein, 7 aa, Artificial Sequence
  epitope
IGATEPS

SEQ ID NO: 466 - protein, 15 aa, Artificial Sequence
  epitope
  misc_feature (4)..(8): Xaa can be any naturally occurring amino acid
KWRXXXXXGATEPSQ

SEQ ID NO: 467 - protein, 15 aa, Artificial Sequence
  epitope
  misc_feature (2)..(2): Xaa can be any naturally occurring amino acid
  misc_feature (4)..(10): Xaa can be any naturally occurring amino acid
KXRXXXXXXXTEPSQ

SEQ ID NO: 468 - protein, 6 aa, Artificial Sequence
  epitope
RAVLKI

SEQ ID NO: 469 - protein, 15 aa, Artificial Sequence
  epitope
  misc_feature (1)..(6): Xaa can be any naturally occurring amino acid
  misc_feature (11)..(11): Xaa can be any naturally occurring amino acid
XXXXXXKIGAXEPSQ

SEQ ID NO: 470 - protein, 15 aa, Artificial Sequence
  epitope
  misc_feature (1)..(6): Xaa can be any naturally occurring amino acid
  misc_feature (9)..(12): Xaa can be any naturally occurring amino acid
XXXXXXKIXXXXPSQ

SEQ ID NO: 471 - protein, 10 aa, Artificial Sequence
  epitope
KWRAVLKIGA

SEQ ID NO: 472 - protein, 10 aa, Artificial Sequence
  epitope
  misc_feature (1)..(6): Xaa can be any naturally occurring amino acid
XXXXXXKIGA

SEQ ID NO: 473 - protein, 10 aa, Artificial Sequence
  epitope
RAVLKIGATE

SEQ ID NO: 474 - protein, 10 aa, Artificial Sequence
  epitope
  misc_feature (1)..(4): Xaa can be any naturally occurring amino acid
  misc_feature (9)..(9): Xaa can be any naturally occurring amino acid
XXXXKIGAXE

SEQ ID NO: 475 - protein, 10 aa, Artificial Sequence
  epitope
VLKIGATEPS

SEQ ID NO: 476 - protein, 9 aa, Artificial Sequence
  epitope
LKIGATEPS

SEQ ID NO: 477 - protein, 8 aa, Artificial Sequence
  epitope
KIGATEPS

SEQ ID NO: 478 - protein, 8 aa, Artificial Sequence
  epitope
  misc_feature (5)..(5): Xaa can be any naturally occurring amino acid
KIGAXEPS

SEQ ID NO: 479 - protein, 8 aa, Artificial Sequence
  epitope
  misc_feature (3)..(6): Xaa can be any naturally occurring amino acid
KIXXXXPS

SEQ ID NO: 480 - protein, 15 aa, Artificial Sequence
  epitope
  misc_feature (1)..(6): Xaa can be any naturally occurring amino acid
  misc_feature (8)..(8): Xaa can be any naturally occurring amino acid
  misc_feature (11)..(14): Xaa can be any naturally occurring amino acid
XXXXXXKXGAXXXXQ

SEQ ID NO: 481 - protein, 8 aa, Artificial Sequence
  epitope
RAVLKIGA

SEQ ID NO: 482 - protein, 4 aa, Artificial Sequence
  epitope
LKIG

SEQ ID NO: 483 - protein, 15 aa, Artificial Sequence
  epitope
  misc_feature (1)..(6): Xaa can be any naturally occurring amino acid
  misc_feature (8)..(9): Xaa can be any naturally occurring amino acid
  misc_feature (11)..(12): Xaa can be any naturally occurring amino acid
XXXXXXKXXAXXPSQ

SEQ ID NO: 484 - protein, 10 aa, Artificial Sequence
  epitope
LKIGATEPSQ

SEQ ID NO: 485 - protein, 10 aa, Artificial Sequence
  epitope
  misc_feature (1)..(1): Xaa can be any naturally occurring amino acid
  misc_feature (3)..(4): Xaa can be any naturally occurring amino acid
  misc_feature (6)..(7): Xaa can be any naturally occurring amino acid
XKXXAXXPSQ

SEQ ID NO: 486 - protein, 6 aa, Artificial Sequence
  epitope
KIGATE

SEQ ID NO: 487 - protein, 4 aa, Artificial Sequence
  epitope
IGAT

SEQ ID NO: 488 - protein, 9 aa, Artificial Sequence
  epitope
KWRAVLKIG

SEQ ID NO: 489 - protein, 8 aa, Artificial Sequence
  epitope
KIGATEPS

SEQ ID NO: 490 - protein, 10 aa, Artificial Sequence
  epitope
KWRAVLKIGA

SEQ ID NO: 491 - protein, 6 aa, Artificial Sequence
  epitope
KIGATE

SEQ ID NO: 492 - protein, 4 aa, Artificial Sequence
  epitope
KIGA

SEQ ID NO: 493 - protein, 15 aa, Artificial Sequence
  epitope
PQQPYPQQQPQYLQP

SEQ ID NO: 494 - protein, 15 aa, Artificial Sequence
  epitope
  misc_feature (2)..(6): Xaa can be any naturally occurring amino acid
PXXXXXQQQPQYLQP

SEQ ID NO: 495 - protein, 4 aa, Artificial Sequence
  epitope
QQQP

SEQ ID NO: 496 - protein, 7 aa, Artificial Sequence
  epitope
QPYPQQQ

SEQ ID NO: 497 - protein, 10 aa, Artificial Sequence
  epitope
YPQQQPQYLQ

SEQ ID NO: 498 - protein, 15 aa, Artificial Sequence
  epitope
  misc_feature (1)..(6): Xaa can be any naturally occurring amino acid
  misc_feature (10)..(10): Xaa can be any naturally occurring amino acid
  misc_feature (12)..(15): Xaa can be any naturally occurring amino acid
XXXXXXQQQXQXXXX

SEQ ID NO: 499 - protein, 4 aa, Artificial Sequence
  epitope
YPQQ

SEQ ID NO: 500 - protein, 9 aa, Artificial Sequence
  epitope
PQQPYPQQQ

SEQ ID NO: 501 - protein, 10 aa, Artificial Sequence
  epitope
QPYPQQQPQY

SEQ ID NO: 502 - protein, 10 aa, Artificial Sequence
  epitope
  misc_feature (1)..(4): Xaa can be any naturally occurring amino acid
XXXXQQQPQY

SEQ ID NO: 503 - protein, 10 aa, Artificial Sequence
  epitope
YPQQQPQYLQ

SEQ ID NO: 504 - protein, 10 aa, Artificial Sequence
  epitope
  misc_feature (1)..(2): Xaa can be any naturally occurring amino acid
  misc_feature (9)..(10): Xaa can be any naturally occurring amino acid
XXQQQPQYXX

SEQ ID NO: 505 - protein, 5 aa, Artificial Sequence
  epitope
PQQQP

SEQ ID NO: 506 - protein, 15 aa, Artificial Sequence
  epitope
  misc_feature (1)..(7): Xaa can be any naturally occurring amino acid
  misc_feature (10)..(10): Xaa can be any naturally occurring amino acid
  misc_feature (14)..(15): Xaa can be any naturally occurring amino acid
XXXXXXXQQXQYLXX

SEQ ID NO: 507 - protein, 15 aa, Artificial Sequence
  epitope
  misc_feature (1)..(7): Xaa can be any naturally occurring amino acid
  misc_feature (13)..(15): Xaa can be any naturally occurring amino acid
XXXXXXXQQPQYXXX

SEQ ID NO: 508 - protein, 7 aa, Artificial Sequence
  epitope
QPYPQQQ

SEQ ID NO: 509 - protein, 5 aa, Artificial Sequence
  epitope
YPQQQ

SEQ ID NO: 510 - protein, 15 aa, Artificial Sequence
  epitope
  misc_feature (1)..(2): Xaa can be any naturally occurring amino acid
  misc_feature (4)..(6): Xaa can be any naturally occurring amino acid
  misc_feature (10)..(10): Xaa can be any naturally occurring amino acid
  misc_feature (14)..(15): Xaa can be any naturally occurring amino acid
XXQXXXQQQXQYLXX

SEQ ID NO: 511 - protein, 9 aa, Artificial Sequence
  epitope
QPYPQQQPQ

SEQ ID NO: 512 - protein, 7 aa, Artificial Sequence
  epitope
QPYPQQQ

SEQ ID NO: 513 - protein, 10 aa, Artificial Sequence
  epitope
YPQQQPQYLQ

SEQ ID NO: 514 - protein, 10 aa, Artificial Sequence
  epitope
  misc_feature (1)..(2): Xaa can be any naturally occurring amino acid
  misc_feature (6)..(6): Xaa can be any naturally occurring amino acid
  misc_feature (10)..(10): Xaa can be any naturally occurring amino acid
XXQQQXQYLX

SEQ ID NO: 515 - protein, 15 aa, Artificial Sequence
  epitope
  misc_feature (1)..(11): Xaa can be any naturally occurring amino acid
XXXXXXXXXXXYLQP

SEQ ID NO: 516 - protein, 10 aa, Artificial Sequence
  epitope
PQQPYPQQQP

SEQ ID NO: 517 - protein, 6 aa, Artificial Sequence
  epitope
QQQPQY

SEQ ID NO: 518 - protein, 15 aa, Artificial Sequence
  epitope
  misc_feature (1)..(7): Xaa can be any naturally occurring amino acid
  misc_feature (10)..(10): Xaa can be any naturally occurring amino acid
  misc_feature (12)..(14): Xaa can be any naturally occurring amino acid
XXXXXXXQQXQXXXP

SEQ ID NO: 519 - protein, 10 aa, Artificial Sequence
  epitope
QQPYPQQQPQ

SEQ ID NO: 520 - protein, 10 aa, Artificial Sequence
  epitope
YPQQQPQYLQ

SEQ ID NO: 521 - protein, 6 aa, Artificial Sequence
  epitope
YPQQQP

SEQ ID NO: 522 - protein, 10 aa, Artificial Sequence
  epitope
YPQQQPQYLQ

SEQ ID NO: 523 - protein, 6 aa, Artificial Sequence
  epitope
QPYPQQ

SEQ ID NO: 524 - protein, 4 aa, Artificial Sequence
  epitope
YPQQ

SEQ ID NO: 525 - protein, 15 aa, Artificial Sequence
  epitope
  misc_feature (1)..(2): Xaa can be any naturally occurring amino acid
  misc_feature (4)..(5): Xaa can be any naturally occurring amino acid
  misc_feature (13)..(15): Xaa can be any naturally occurring amino acid
XXQXXPQQQPQYXXX

SEQ ID NO: 526 - protein, 10 aa, Artificial Sequence
  epitope
PYPQQQPQYL

SEQ ID NO: 527 - protein, 8 aa, Artificial Sequence
  epitope
PYPQQQPQ

SEQ ID NO: 528 - protein, 8 aa, Artificial Sequence
  epitope
  misc_feature (1)..(2): Xaa can be any naturally occurring amino acid
XXPQQQPQ

SEQ ID NO: 529 - protein, 8 aa, Artificial Sequence
  epitope
  misc_feature (1)..(3): Xaa can be any naturally occurring amino acid
XXXQQQPQ

SEQ ID NO: 530 - protein, 15 aa, Artificial Sequence
  epitope
  misc_feature (1)..(4): Xaa can be any naturally occurring amino acid
  misc_feature (13)..(15): Xaa can be any naturally occurring amino acid
XXXXYPQQQPQYXXX

SEQ ID NO: 531 - protein, 8 aa, Artificial Sequence
  epitope
QQPYPQQQ

SEQ ID NO: 532 - protein, 7 aa, Artificial Sequence
  epitope
QQPYPQQ

SEQ ID NO: 533 - protein, 7 aa, Artificial Sequence
  epitope
  misc_feature (1)..(3): Xaa can be any naturally occurring amino acid
XXXYPQQ

SEQ ID NO: 534 - protein, 10 aa, Artificial Sequence
  epitope
YPQQQPQYLQ

SEQ ID NO: 535 - protein, 10 aa, Artificial Sequence
  epitope
  misc_feature (9)..(10): Xaa can be any naturally occurring amino acid
YPQQQPQYXX

SEQ ID NO: 536 - protein, 15 aa, Artificial Sequence
  epitope
  misc_feature (1)..(2): Xaa can be any naturally occurring amino acid
  misc_feature (4)..(7): Xaa can be any naturally occurring amino acid
  misc_feature (10)..(10): Xaa can be any naturally occurring amino acid
  misc_feature (15)..(15): Xaa can be any naturally occurring amino acid
XXQXXXXQQXQYLQX

SEQ ID NO: 537 - protein, 15 aa, Artificial Sequence
  epitope
  misc_feature (1)..(7): Xaa can be any naturally occurring amino acid
  misc_feature (10)..(11): Xaa can be any naturally occurring amino acid
  misc_feature (14)..(15): Xaa can be any naturally occurring amino acid
XXXXXXXQQXXYLXX

SEQ ID NO: 538 - protein, 4 aa, Artificial Sequence
  epitope
QQQP

SEQ ID NO: 539 - protein, 5 aa, Artificial Sequence
  epitope
YPQQQ

SEQ ID NO: 540 - protein, 15 aa, Artificial Sequence
  epitope
  misc_feature (2)..(2): Xaa can be any naturally occurring amino acid
  misc_feature (4)..(6): Xaa can be any naturally occurring amino acid
  misc_feature (8)..(11): Xaa can be any naturally occurring amino acid
  misc_feature (14)..(15): Xaa can be any naturally occurring amino acid
PXQXXXQXXXXYLXX

SEQ ID NO: 541 - protein, 15 aa, Artificial Sequence
  epitope
  misc_feature (1)..(7): Xaa can be any naturally occurring amino acid
XXXXXXXQQPQYLQP

SEQ ID NO: 542 - protein, 15 aa, Artificial Sequence
  epitope
  misc_feature (1)..(8): Xaa can be any naturally occurring amino acid
  misc_feature (10)..(10): Xaa can be any naturally occurring amino acid
XXXXXXXXQXQYLQP

SEQ ID NO: 543 - protein, 9 aa, Artificial Sequence
  epitope
PQQPYPQQQ

SEQ ID NO: 544 - protein, 8 aa, Artificial Sequence
  epitope
YPQQQPQY

SEQ ID NO: 545 - protein, 8 aa, Artificial Sequence
  epitope
  misc_feature (1)..(3): Xaa can be any naturally occurring amino acid
XXXQQPQY

SEQ ID NO: 546 - protein, 15 aa, Artificial Sequence
  epitope
  misc_feature (1)..(2): Xaa can be any naturally occurring amino acid
  misc_feature (4)..(7): Xaa can be any naturally occurring amino acid
  misc_feature (9)..(11): Xaa can be any naturally occurring amino acid
  misc_feature (14)..(15): Xaa can be any naturally occurring amino acid
XXQXXXXQXXXYLXX

SEQ ID NO: 547 - protein, 4 aa, Artificial Sequence
  epitope
PQQQ

SEQ ID NO: 548 - protein, 15 aa, Artificial Sequence
  epitope
  misc_feature (1)..(2): Xaa can be any naturally occurring amino acid
  misc_feature (4)..(6): Xaa can be any naturally occurring amino acid
  misc_feature (12)..(15): Xaa can be any naturally occurring amino acid
XXQXXXQQQPQXXXX

SEQ ID NO: 549 - protein, 7 aa, Artificial Sequence
  epitope
QPYPQQQ

SEQ ID NO: 550 - protein, 10 aa, Artificial Sequence
  epitope
YPQQQPQYLQ

SEQ ID NO: 551 - protein, 4 aa, Artificial Sequence
  epitope
PQQQ

SEQ ID NO: 552 - protein, 6 aa, Artificial Sequence
  epitope
QPQYLQ

SEQ ID NO: 553 - protein, 15 aa, Artificial Sequence
  epitope
  misc_feature (1)..(7): Xaa can be any naturally occurring amino acid
  misc_feature (9)..(10): Xaa can be any naturally occurring amino acid
  misc_feature (14)..(15): Xaa can be any naturally occurring amino acid
XXXXXXXQXXQYLXX

SEQ ID NO: 554 - protein, 15 aa, Artificial Sequence
  epitope
  misc_feature (1)..(2): Xaa can be any naturally occurring amino acid
  misc_feature (13)..(13): Xaa can be any naturally occurring amino acid
XXQPYPQQQPQYXQP

SEQ ID NO: 555 - protein, 10 aa, Artificial Sequence
  epitope
PQQPYPQQQP

SEQ ID NO: 556 - protein, 10 aa, Artificial Sequence
  epitope
  misc_feature (1)..(2): Xaa can be any naturally occurring amino acid
XXQPYPQQQP

SEQ ID NO: 557 - protein, 10 aa, Artificial Sequence
  epitope
YPQQQPQYLQ

SEQ ID NO: 558 - protein, 8 aa, Artificial Sequence
  epitope
YPQQQPQY

SEQ ID NO: 559 - protein, 8 aa, Artificial Sequence
  epitope
  misc_feature (1)..(3): Xaa can be any naturally occurring amino acid
XXXQQPQY

SEQ ID NO: 560 - protein, 6 aa, Artificial Sequence
  epitope
QQQPQY

SEQ ID NO: 561 - protein, 6 aa, Artificial Sequence
  epitope
PQQPYP

SEQ ID NO: 562 - protein, 15 aa, Artificial Sequence
  epitope
KPSQQQPLPLQQILW

SEQ ID NO: 563 - protein, 15 aa, Artificial Sequence
  epitope
  misc_feature (1)..(3): Xaa can be any naturally occurring amino acid
  misc_feature (7)..(9): Xaa can be any naturally occurring amino acid
  misc_feature (13)..(15): Xaa can be any naturally occurring amino acid
XXXQQQXXXLQQXXX

SEQ ID NO: 564 - protein, 6 aa, Artificial Sequence
  epitope
KPSQQQ

SEQ ID NO: 565 - protein, 8 aa, Artificial Sequence
  epitope
QQPLPLQQ

SEQ ID NO: 566 - protein, 8 aa, Artificial Sequence
  epitope
  misc_feature (3)..(5): Xaa can be any naturally occurring amino acid
QQXXXLQQ

SEQ ID NO: 567 - protein, 5 aa, Artificial Sequence
  epitope
PSQQQ

SEQ ID NO: 568 - protein, 4 aa, Artificial Sequence
  epitope
SQQQ

SEQ ID NO: 569 - protein, 8 aa, Artificial Sequence
  epitope
SQQQPLPL

SEQ ID NO: 570 - protein, 15 aa, Artificial Sequence
  epitope
  misc_feature (1)..(4): Xaa can be any naturally occurring amino acid
  misc_feature (7)..(8): Xaa can be any naturally occurring amino acid
  misc_feature (13)..(15): Xaa can be any naturally occurring amino acid
XXXXQQXXPLQQXXX

SEQ ID NO: 571 - protein, 9 aa, Artificial Sequence
  epitope
QPLPLQQIL

SEQ ID NO: 572 - protein, 8 aa, Artificial Sequence
  epitope
QPLPLQQI

SEQ ID NO: 573 - protein, 8 aa, Artificial Sequence
  epitope
  misc_feature (2)..(3): Xaa can be any naturally occurring amino acid
  misc_feature (8)..(8): Xaa can be any naturally occurring amino acid
QXXPLQQX

SEQ ID NO: 574 - protein, 8 aa, Artificial Sequence
  epitope
  misc_feature (2)..(4): Xaa can be any naturally occurring amino acid
  misc_feature (8)..(8): Xaa can be any naturally occurring amino acid
QXXXLQQX

SEQ ID NO: 575 - protein, 15 aa, Artificial Sequence
  epitope
  misc_feature (1)..(4): Xaa can be any naturally occurring amino acid
  misc_feature (8)..(8): Xaa can be any naturally occurring amino acid
  misc_feature (13)..(15): Xaa can be any naturally occurring amino acid
XXXXQQPXPLQQXXX

SEQ ID NO: 576 - protein, 15 aa, Artificial Sequence
  epitope
  misc_feature (1)..(4): Xaa can be any naturally occurring amino acid
  misc_feature (7)..(8): Xaa can be any naturally occurring amino acid
  misc_feature (13)..(15): Xaa can be any naturally occurring amino acid
XXXXQQXXPLQQXXX

SEQ ID NO: 577 - protein, 15 aa, Artificial Sequence
  epitope
  misc_feature (1)..(5): Xaa can be any naturally occurring amino acid
  misc_feature (7)..(8): Xaa can be any naturally occurring amino acid
  misc_feature (13)..(15): Xaa can be any naturally occurring amino acid
XXXXXQXXPLQQXXX

SEQ ID NO: 578 - protein, 7 aa, Artificial Sequence
  epitope
QPLPLQQ

SEQ ID NO: 579 - protein, 4 aa, Artificial Sequence
  epitope
PLQQ

SEQ ID NO: 580 - protein, 15 aa, Artificial Sequence
  epitope
  misc_feature (1)..(3): Xaa can be any naturally occurring amino acid
  misc_feature (5)..(5): Xaa can be any naturally occurring amino acid
  misc_feature (8)..(8): Xaa can be any naturally occurring amino acid
  misc_feature (14)..(15): Xaa can be any naturally occurring amino acid
XXXQXQPXPLQQIXX

SEQ ID NO: 581 - protein, 15 aa, Artificial Sequence
  epitope
  misc_feature (1)..(5): Xaa can be any naturally occurring amino acid
  misc_feature (8)..(8): Xaa can be any naturally occurring amino acid
  misc_feature (14)..(15): Xaa can be any naturally occurring amino acid
XXXXXQPXPLQQIXX

SEQ ID NO: 582 - protein, 7 aa, Artificial Sequence
  epitope
QPLPLQQ

SEQ ID NO: 583 - protein, 7 aa, Artificial Sequence
  epitope
  misc_feature (3)..(3): Xaa can be any naturally occurring amino acid
QPXPLQQ

SEQ ID NO: 584 - protein, 7 aa, Artificial Sequence
  epitope
  misc_feature (2)..(3): Xaa can be any naturally occurring amino acid
QXXPLQQ

SEQ ID NO: 585 - protein, 15 aa, Artificial Sequence
  epitope
  misc_feature (1)..(5): Xaa can be any naturally occurring amino acid
  misc_feature (8)..(8): Xaa can be any naturally occurring amino acid
  misc_feature (13)..(15): Xaa can be any naturally occurring amino acid
XXXXXQPXPLQQXXX

SEQ ID NO: 586 - protein, 15 aa, Artificial Sequence
  epitope
  misc_feature (1)..(6): Xaa can be any naturally occurring amino acid
  misc_feature (8)..(8): Xaa can be any naturally occurring amino acid
  misc_feature (13)..(15): Xaa can be any naturally occurring amino acid
XXXXXXPXPLQQXXX

SEQ ID NO: 587 - protein, 10 aa, Artificial Sequence
  epitope
LEKPSQQQPL

SEQ ID NO: 588 - protein, 6 aa, Artificial Sequence
  epitope
KPSQQQ

SEQ ID NO: 589 - protein, 8 aa, Artificial Sequence
  epitope
QQPLPLQQ

SEQ ID NO: 590 - protein, 8 aa, Artificial Sequence
  epitope
  misc_feature (1)..(1): Xaa can be any naturally occurring amino acid
  misc_feature (4)..(4): Xaa can be any naturally occurring amino acid
XQPXPLQQ

SEQ ID NO: 591 - protein, 8 aa, Artificial Sequence
  epitope
  misc_feature (1)..(2): Xaa can be any naturally occurring amino acid
  misc_feature (4)..(4): Xaa can be any naturally occurring amino acid
XXPXPLQQ

SEQ ID NO: 592 - protein, 15 aa, Artificial Sequence
  epitope
  misc_feature (2)..(5): Xaa can be any naturally occurring amino acid
  misc_feature (7)..(9): Xaa can be any naturally occurring amino acid
  misc_feature (12)..(15): Xaa can be any naturally occurring amino acid
KXXXXQXXXLQXXXX

SEQ ID NO: 593 - protein, 15 aa, Artificial Sequence
  epitope
  misc_feature (1)..(2): Xaa can be any naturally occurring amino acid
  misc_feature (7)..(8): Xaa can be any naturally occurring amino acid
  misc_feature (13)..(15): Xaa can be any naturally occurring amino acid
XXSQQQXXPLQQXXX

SEQ ID NO: 594 - protein, 15 aa, Artificial Sequence
  epitope
  misc_feature (1)..(4): Xaa can be any naturally occurring amino acid
  misc_feature (7)..(8): Xaa can be any naturally occurring amino acid
  misc_feature (13)..(15): Xaa can be any naturally occurring amino acid
XXXXQQXXPLQQXXX

SEQ ID NO: 595 - protein, 9 aa, Artificial Sequence
  epitope
QQPLPLQQI

SEQ ID NO: 596 - protein, 7 aa, Artificial Sequence
  epitope
QPLPLQQ

SEQ ID NO: 597 - protein, 7 aa, Artificial Sequence
  epitope
  misc_feature (2)..(3): Xaa can be any naturally occurring amino acid
QXXPLQQ

SEQ ID NO: 598 - protein, 7 aa, Artificial Sequence
  epitope
  misc_feature (2)..(3): Xaa can be any naturally occurring amino acid
  misc_feature (7)..(7): Xaa can be any naturally occurring amino acid
QXXPLQX

SEQ ID NO: 599 - protein, 15 aa, Artificial Sequence
  epitope
  misc_feature (2)..(2): Xaa can be any naturally occurring amino acid
  misc_feature (7)..(15): Xaa can be any naturally occurring amino acid
KXSQQQXXXXXXXXX

SEQ ID NO: 600 - protein, 6 aa, Artificial Sequence
  epitope
KPSQQQ

SEQ ID NO: 601 - protein, 4 aa, Artificial Sequence
  epitope
SQQQ

SEQ ID NO: 602 - protein, 15 aa, Artificial Sequence
  epitope
  misc_feature (4)..(4): Xaa can be any naturally occurring amino acid
  misc_feature (13)..(15): Xaa can be any naturally occurring amino acid
KPSXQQPLPLQQXXX

SEQ ID NO: 603 - protein, 15 aa, Artificial Sequence
  epitope
  misc_feature (1)..(5): Xaa can be any naturally occurring amino acid
  misc_feature (13)..(15): Xaa can be any naturally occurring amino acid
XXXXXQPLPLQQXXX

SEQ ID NO: 604 - protein, 7 aa, Artificial Sequence
  epitope
QPLPLQQ

SEQ ID NO: 605 - protein, 7 aa, Artificial Sequence
  epitope
  misc_feature (3)..(3): Xaa can be any naturally occurring amino acid
QPXPLQQ

SEQ ID NO: 606 - protein, 15 aa, Artificial Sequence
  epitope
  misc_feature (1)..(2): Xaa can be any naturally occurring amino acid
  misc_feature (8)..(8): Xaa can be any naturally occurring amino acid
  misc_feature (14)..(15): Xaa can be any naturally occurring amino acid
XXSQQQPXPLQQIXX

SEQ ID NO: 607 - protein, 15 aa, Artificial Sequence
  epitope
  misc_feature (1)..(3): Xaa can be any naturally occurring amino acid
  misc_feature (7)..(8): Xaa can be any naturally occurring amino acid
  misc_feature (13)..(15): Xaa can be any naturally occurring amino acid
XXXQQQXXPLQQXXX

SEQ ID NO: 608 - protein, 7 aa, Artificial Sequence
  epitope
QPLPLQQ

SEQ ID NO: 609 - protein, 7 aa, Artificial Sequence
  epitope
  misc_feature (3)..(3): Xaa can be any naturally occurring amino acid
QPXPLQQ

SEQ ID NO: 610 - protein, 7 aa, Artificial Sequence
  epitope
  misc_feature (2)..(3): Xaa can be any naturally occurring amino acid
QXXPLQQ

SEQ ID NO: 611 - protein, 4 aa, Artificial Sequence
  epitope
PLQQ

SEQ ID NO: 612 - protein, 15 aa, Artificial Sequence
  epitope
  misc_feature (1)..(1): Xaa can be any naturally occurring amino acid
  misc_feature (3)..(3): Xaa can be any naturally occurring amino acid
  misc_feature (5)..(5): Xaa can be any naturally occurring amino acid
  misc_feature (15)..(15): Xaa can be any naturally occurring amino acid
XPXQXQPLPLQQILX

SEQ ID NO: 613 - protein, 15 aa, Artificial Sequence
  epitope
  misc_feature (1)..(5): Xaa can be any naturally occurring amino acid
  misc_feature (15)..(15): Xaa can be any naturally occurring amino acid
XXXXXQPLPLQQILX

SEQ ID NO: 614 - protein, 15 aa, Artificial Sequence
  epitope
  misc_feature (1)..(5): Xaa can be any naturally occurring amino acid
  misc_feature (14)..(15): Xaa can be any naturally occurring amino acid
XXXXXQPLPLQQIXX

SEQ ID NO: 615 - protein, 8 aa, Artificial Sequence
  epitope
KPSQQQPL

SEQ ID NO: 616 - protein, 6 aa, Artificial Sequence
  epitope
KPSQQQ

SEQ ID NO: 617 - protein, 8 aa, Artificial Sequence
  epitope
QQPLPLQQ

SEQ ID NO: 618 - protein, 8 aa, Artificial Sequence
  epitope
  misc_feature (1)..(1): Xaa can be any naturally occurring amino acid
XQPLPLQQ

SEQ ID NO: 619 - protein, 15 aa, Artificial Sequence
  epitope
  misc_feature (1)..(2): Xaa can be any naturally occurring amino acid
  misc_feature (8)..(8): Xaa can be any naturally occurring amino acid
  misc_feature (14)..(15): Xaa can be any naturally occurring amino acid
XXSQQQPXPLQQIXX

SEQ ID NO: 620 - protein, 15 aa, Artificial Sequence
  epitope
  misc_feature (1)..(5): Xaa can be any naturally occurring amino acid
  misc_feature (8)..(8): Xaa can be any naturally occurring amino acid
  misc_feature (13)..(15): Xaa can be any naturally occurring amino acid
XXXXXQPXPLQQXXX

SEQ ID NO: 621 - protein, 8 aa, Artificial Sequence
  epitope
QPLPLQQI

SEQ ID NO: 622 - protein, 7 aa, Artificial Sequence
  epitope
QPLPLQQ

SEQ ID NO: 623 - protein, 7 aa, Artificial Sequence
  epitope
  misc_feature (3)..(3): Xaa can be any naturally occurring amino acid
QPXPLQQ

SEQ ID NO: 624 - protein, 7 aa, Artificial Sequence
  epitope
  misc_feature (3)..(3): Xaa can be any naturally occurring amino acid
QPXPLQQ

SEQ ID NO: 625 - protein, 7 aa, Artificial Sequence
  epitope
  misc_feature (2)..(3): Xaa can be any naturally occurring amino acid
QXXPLQQ

SEQ ID NO: 626 - protein, 15 aa, Artificial Sequence
  epitope
  misc_feature (1)..(4): Xaa can be any naturally occurring amino acid
  misc_feature (13)..(15): Xaa can be any naturally occurring amino acid
XXXXQQPLPLQQXXX

SEQ ID NO: 627 - protein, 15 aa, Artificial Sequence
  epitope
  misc_feature (1)..(5): Xaa can be any naturally occurring amino acid
  misc_feature (7)..(7): Xaa can be any naturally occurring amino acid
  misc_feature (13)..(15): Xaa can be any naturally occurring amino acid
XXXXXQXLPLQQXXX

SEQ ID NO: 628 - protein, 15 aa, Artificial Sequence
  epitope
  misc_feature (1)..(5): Xaa can be any naturally occurring amino acid
  misc_feature (7)..(9): Xaa can be any naturally occurring amino acid
  misc_feature (13)..(15): Xaa can be any naturally occurring amino acid
XXXXXQXXXLQQXXX

SEQ ID NO: 629 - protein, 4 aa, Artificial Sequence
  epitope
PLQQ

SEQ ID NO: 630 - protein, 15 aa, Artificial Sequence
  epitope
  misc_feature (1)..(5): Xaa can be any naturally occurring amino acid
  misc_feature (7)..(9): Xaa can be any naturally occurring amino acid
  misc_feature (13)..(15): Xaa can be any naturally occurring amino acid
XXXXXQXXXLQQXXX

SEQ ID NO: 631 - protein, 7 aa, Artificial Sequence
  epitope
QPLPLQQ

SEQ ID NO: 632 - protein, 9 aa, Artificial Sequence
  epitope
KPSQQQPLP

SEQ ID NO: 633 - protein, 4 aa, Artificial Sequence
  epitope
SQQQ

SEQ ID NO: 634 - protein, 5 aa, Artificial Sequence
  epitope
LQQIL

SEQ ID NO: 635 - protein, 15 aa, Artificial Sequence
  epitope
  misc_feature (2)..(4): Xaa can be any naturally occurring amino acid
  misc_feature (7)..(8): Xaa can be any naturally occurring amino acid
  misc_feature (13)..(15): Xaa can be any naturally occurring amino acid
KXXXQQXXPLQQXXX

SEQ ID NO: 636 - protein, 15 aa, Artificial Sequence
  epitope
  misc_feature (1)..(5): Xaa can be any naturally occurring amino acid
  misc_feature (7)..(9): Xaa can be any naturally occurring amino acid
  misc_feature (13)..(15): Xaa can be any naturally occurring amino acid
XXXXXQXXXLQQXXX

SEQ ID NO: 637 - protein, 6 aa, Artificial Sequence
  epitope
KPSQQQ

SEQ ID NO: 638 - protein, 5 aa, Artificial Sequence
  epitope
PLQQI

SEQ ID NO: 639 - protein, 4 aa, Artificial Sequence
  epitope
LQQI

SEQ ID NO: 640 - protein, 15 aa, Artificial Sequence
  epitope
QVPLVQQQQFPGQQQ

SEQ ID NO: 641 - protein, 4 aa, Artificial Sequence
  epitope
PLVQ

SEQ ID NO: 642 - protein, 9 aa, Artificial Sequence
  epitope
QQQFPGQQQ

SEQ ID NO: 643 - protein, 7 aa, Artificial Sequence
  epitope
QVPLVQQ

SEQ ID NO: 644 - protein, 6 aa, Artificial Sequence
  epitope
QVPLVQ

SEQ ID NO: 645 - protein, 7 aa, Artificial Sequence
  epitope
  misc_feature (2)..(3): Xaa can be any naturally occurring amino acid
  misc_feature (5)..(5): Xaa can be any naturally occurring amino acid
QXXLXQQ

SEQ ID NO: 646 - protein, 15 aa, Artificial Sequence
  epitope
  misc_feature (2)..(4): Xaa can be any naturally occurring amino acid
  misc_feature (8)..(15): Xaa can be any naturally occurring amino acid
QXXXVQQXXXXXXXX

SEQ ID NO: 647 - protein, 9 aa, Artificial Sequence
  epitope
QEQVPLVQQ

SEQ ID NO: 648 - protein, 7 aa, Artificial Sequence
  epitope
EQVPLVQ

SEQ ID NO: 649 - protein, 7 aa, Artificial Sequence
  epitope
  misc_feature (3)..(5): Xaa can be any naturally occurring amino acid
EQXXXVQ

SEQ ID NO: 650 - protein, 6 aa, Artificial Sequence
  epitope
QVPLVQ

SEQ ID NO: 651 - protein, 9 aa, Artificial Sequence
  epitope
QQQFPGQQQ

SEQ ID NO: 652 - protein, 15 aa, Artificial Sequence
  epitope
  misc_feature (2)..(3): Xaa can be any naturally occurring amino acid
  misc_feature (8)..(15): Xaa can be any naturally occurring amino acid
QXXLVQQXXXXXXXX

SEQ ID NO: 653 - protein, 7 aa, Artificial Sequence
  epitope
QVPLVQQ

SEQ ID NO: 654 - protein, 5 aa, Artificial Sequence
  epitope
PLVQQ

SEQ ID NO: 655 - protein, 5 aa, Artificial Sequence
  epitope
  misc_feature (1)..(1): Xaa can be any naturally occurring amino acid
XLVQQ

SEQ ID NO: 656 - protein, 10 aa, Artificial Sequence
  epitope
QQQQFPGQQQ

SEQ ID NO: 657 - protein, 8 aa, Artificial Sequence
  epitope
QQFPGQQQ

SEQ ID NO: 658 - protein, 15 aa, Artificial Sequence
  epitope
  misc_feature (2)..(4): Xaa can be any naturally occurring amino acid
  misc_feature (8)..(15): Xaa can be any naturally occurring amino acid
QXXXVQQXXXXXXXX

SEQ ID NO: 659 - protein, 7 aa, Artificial Sequence
  epitope
QVPLVQQ

SEQ ID NO: 660 - protein, 7 aa, Artificial Sequence
  epitope
  misc_feature (2)..(4): Xaa can be any naturally occurring amino acid
QXXXVQQ

SEQ ID NO: 661 - protein, 6 aa, Artificial Sequence
  epitope
QVPLVQ

SEQ ID NO: 662 - protein, 5 aa, Artificial Sequence
  epitope
VPLVQ

SEQ ID NO: 663 - protein, 8 aa, Artificial Sequence
  epitope
QQFPGQQQ

SEQ ID NO: 664 - protein, 10 aa, Artificial Sequence
  epitope
QQQQFPGQQQ

SEQ ID NO: 665 - protein, 9 aa, Artificial Sequence
  epitope
QQQFPGQQQ

SEQ ID NO: 666 - protein, 7 aa, Artificial Sequence
  epitope
QQFPGQQ

SEQ ID NO: 667 - protein, 7 aa, Artificial Sequence
  epitope
FPGQQQP

SEQ ID NO: 668 - protein, 6 aa, Artificial Sequence
  epitope
FPGQQQ

SEQ ID NO: 669 - protein, 15 aa, Artificial Sequence
  epitope
  misc_feature (1)..(5): Xaa can be any naturally occurring amino acid
  misc_feature (9)..(13): Xaa can be any naturally occurring amino acid
XXXXXQQQXXXXXQQ

SEQ ID NO: 670 - protein, 10 aa, Artificial Sequence
  epitope
QEQVPLVQQQ

SEQ ID NO: 671 - protein, 9 aa, Artificial Sequence
  epitope
EQVPLVQQQ

SEQ ID NO: 672 - protein, 9 aa, Artificial Sequence
  epitope
  misc_feature (2)..(6): Xaa can be any naturally occurring amino acid
EXXXXXQQQ

SEQ ID NO: 673 - protein, 9 aa, Artificial Sequence
  epitope
PLVQQQQFP

SEQ ID NO: 674 - protein, 4 aa, Artificial Sequence
  epitope
LVQQ

SEQ ID NO: 675 - protein, 8 aa, Artificial Sequence
  epitope
QQFPGQQQ

SEQ ID NO: 676 - protein, 7 aa, Artificial Sequence
  epitope
QFPGQQQ

SEQ ID NO: 677 - protein, 7 aa, Artificial Sequence
  epitope
QVPLVQQ

SEQ ID NO: 678 - protein, 6 aa, Artificial Sequence
  epitope
QVPLVQ

SEQ ID NO: 679 - protein, 8 aa, Artificial Sequence
  epitope
QQFPGQQQ

SEQ ID NO: 680 - protein, 4 aa, Artificial Sequence
  epitope
FPGQ

SEQ ID NO: 681 - protein, 15 aa, Artificial Sequence
  epitope
  misc_feature (2)..(2): Xaa can be any naturally occurring amino acid
  misc_feature (4)..(4): Xaa can be any naturally occurring amino acid
  misc_feature (12)..(12): Xaa can be any naturally occurring amino acid
QXPXVQQQQFPXQQQ

SEQ ID NO: 682 - protein, 15 aa, Artificial Sequence
  epitope
  misc_feature (2)..(2): Xaa can be any naturally occurring amino acid
  misc_feature (4)..(4): Xaa can be any naturally occurring amino acid
  misc_feature (8)..(13): Xaa can be any naturally occurring amino acid
QXPXVQQXXXXXXQQ

SEQ ID NO: 683 - protein, 7 aa, Artificial Sequence
  epitope
QFPGQQQ

SEQ ID NO: 684 - protein, 7 aa, Artificial Sequence
  epitope
  misc_feature (4)..(4): Xaa can be any naturally occurring amino acid
QFPXQQQ

SEQ ID NO: 685 - protein, 6 aa, Artificial Sequence
  epitope
QVPLVQ

SEQ ID NO: 686 - protein, 5 aa, Artificial Sequence
  epitope
FPGQQ

SEQ ID NO: 687 - protein, 15 aa, Artificial Sequence
  epitope
  misc_feature (1)..(5): Xaa can be any naturally occurring amino acid
  misc_feature (7)..(7): Xaa can be any naturally occurring amino acid
  misc_feature (9)..(10): Xaa can be any naturally occurring amino acid
  misc_feature (12)..(12): Xaa can be any naturally occurring amino acid
  misc_feature (14)..(14): Xaa can be any naturally occurring amino acid
XXXXXQXQXXPXQXQ

SEQ ID NO: 688 - protein, 10 aa, Artificial Sequence
  epitope
PLVQQQQFPG

SEQ ID NO: 689 - protein, 8 aa, Artificial Sequence
  epitope
QQFPGQQQ

SEQ ID NO: 690 - protein, 8 aa, Artificial Sequence
  epitope
  misc_feature (2)..(3): Xaa can be any naturally occurring amino acid
  misc_feature (5)..(5): Xaa can be any naturally occurring amino acid
  misc_feature (7)..(7): Xaa can be any naturally occurring amino acid
QXXPXQXQ

SEQ ID NO: 691 - protein, 15 aa, Artificial Sequence
  epitope
  misc_feature (1)..(2): Xaa can be any naturally occurring amino acid
  misc_feature (4)..(8): Xaa can be any naturally occurring amino acid
  misc_feature (10)..(12): Xaa can be any naturally occurring amino acid
XXPXXXXXQXXXQQQ

SEQ ID NO: 692 - protein, 10 aa, Artificial Sequence
  epitope
QQQQFPGQQQ

SEQ ID NO: 693 - protein, 8 aa, Artificial Sequence
  epitope
QQQFPGQQ

SEQ ID NO: 694 - protein, 5 aa, Artificial Sequence
  epitope
VPLVQ

SEQ ID NO: 695 - protein, 5 aa, Artificial Sequence
  epitope
FPGQQ

SEQ ID NO: 696 - protein, 4 aa, Artificial Sequence
  epitope
PLVQ

SEQ ID NO: 697 - protein, 9 aa, Artificial Sequence
  epitope
QQQFPGQQQ

SEQ ID NO: 698 - protein, 9 aa, Artificial Sequence
  epitope
FPGQQQPFP

SEQ ID NO: 699 - protein, 8 aa, Artificial Sequence
  epitope
FPGQQQPF

SEQ ID NO: 700 - protein, 6 aa, Artificial Sequence
  epitope
FPGQQQ

SEQ ID NO: 701 - protein, 8 aa, Artificial Sequence
  epitope
PLVQQQQF

SEQ ID NO: 702 - protein, 5 aa, Artificial Sequence
  epitope
PLVQQ

SEQ ID NO: 703 - protein, 6 aa, Artificial Sequence
  epitope
FPGQQQ

SEQ ID NO: 704 - protein, 9 aa, Artificial Sequence
  epitope
PLVQQQQFP

SEQ ID NO: 705 - protein, 8 aa, Artificial Sequence
  epitope
QQQFPGQQ

SEQ ID NO: 706 - protein, 15 aa, Artificial Sequence
  epitope
VILFEETLYQSTKGG

SEQ ID NO: 707 - protein, 15 aa, Artificial Sequence
  epitope
  misc_feature (1)..(8): Xaa can be any naturally occurring amino acid
  misc_feature (10)..(11): Xaa can be any naturally occurring amino acid
  misc_feature (14)..(14): Xaa can be any naturally occurring amino acid
XXXXXXXXYXXTKXG

SEQ ID NO: 708 - protein, 6 aa, Artificial Sequence
  epitope
QSTKGG

SEQ ID NO: 709 - protein, 5 aa, Artificial Sequence
  epitope
QSTKG

SEQ ID NO: 710 - protein, 6 aa, Artificial Sequence
  epitope
QSTKGG

SEQ ID NO: 711 - protein, 5 aa, Artificial Sequence
  epitope
QSTKG

SEQ ID NO: 712 - protein, 10 aa, Artificial Sequence
  epitope
ILFEETLYQS

SEQ ID NO: 713 - protein, 6 aa, Artificial Sequence
  epitope
QSTKGG

SEQ ID NO: 714 - protein, 5 aa, Artificial Sequence
  epitope
QSTKG

SEQ ID NO: 715 - protein, 15 aa, Artificial Sequence
  epitope
  misc_feature (1)..(8): Xaa can be any naturally occurring amino acid
  misc_feature (10)..(10): Xaa can be any naturally occurring amino acid
XXXXXXXXYXSTKGG

SEQ ID NO: 716 - protein, 4 aa, Artificial Sequence
  epitope
QSTK

SEQ ID NO: 717 - protein, 6 aa, Artificial Sequence
  epitope
QSTKGG

SEQ ID NO: 718 - protein, 5 aa, Artificial Sequence
  epitope
QSTKG

SEQ ID NO: 719 - protein, 15 aa, Artificial Sequence
  epitope
  misc_feature (1)..(8): Xaa can be any naturally occurring amino acid
  misc_feature (10)..(10): Xaa can be any naturally occurring amino acid
  misc_feature (12)..(12): Xaa can be any naturally occurring amino acid
  misc_feature (14)..(14): Xaa can be any naturally occurring amino acid
XXXXXXXXYXSXKXG

SEQ ID NO: 720 - protein, 6 aa, Artificial Sequence
  epitope
QSTKGG

SEQ ID NO: 721 - protein, 6 aa, Artificial Sequence
  epitope
QSTKGG

SEQ ID NO: 722 - protein, 4 aa, Artificial Sequence
  epitope
QSTK

SEQ ID NO: 723 - protein, 4 aa, Artificial Sequence
  epitope
QSTK

SEQ ID NO: 724 - protein, 8 aa, Artificial Sequence
  epitope
ILFEETLY

SEQ ID NO: 725 - protein, 5 aa, Artificial Sequence
  epitope
QSTKG

SEQ ID NO: 726 - protein, 10 aa, Artificial Sequence
  epitope
ILFEETLYQS

SEQ ID NO: 727 - protein, 6 aa, Artificial Sequence
  epitope
QSTKGG

SEQ ID NO: 728 - protein, 5 aa, Artificial Sequence
  epitope
QSTKG

SEQ ID NO: 729 - protein, 4 aa, Artificial Sequence
  epitope
QSTK

SEQ ID NO: 730 - protein, 15 aa, Artificial Sequence
  epitope
  misc_feature (1)..(8): Xaa can be any naturally occurring amino acid
XXXXXXXXYQSTKGG

SEQ ID NO: 731 - protein, 15 aa, Artificial Sequence
  epitope
  misc_feature (1)..(8): Xaa can be any naturally occurring amino acid
  misc_feature (10)..(10): Xaa can be any naturally occurring amino acid
  misc_feature (12)..(12): Xaa can be any naturally occurring amino acid
XXXXXXXXYXSXKGG

SEQ ID NO: 732 - protein, 9 aa, Artificial Sequence
  epitope
VILFEETLY

SEQ ID NO: 733 - protein, 6 aa, Artificial Sequence
  epitope
QSTKGG

SEQ ID NO: 734 - protein, 5 aa, Artificial Sequence
  epitope
QSTKG

SEQ ID NO: 735 - protein, 9 aa, Artificial Sequence
  epitope
VILFEETLY

SEQ ID NO: 736 - protein, 8 aa, Artificial Sequence
  epitope
ILFEETLY

SEQ ID NO: 737 - protein, 6 aa, Artificial Sequence
  epitope
QSTKGG

SEQ ID NO: 738 - protein, 5 aa, Artificial Sequence
  epitope
QSTKG

SEQ ID NO: 739 - protein, 4 aa, Artificial Sequence
  epitope
QSTK

SEQ ID NO: 740 - protein, 15 aa, Artificial Sequence
  epitope
  misc_feature (1)..(7): Xaa can be any naturally occurring amino acid
  misc_feature (10)..(10): Xaa can be any naturally occurring amino acid
XXXXXXXLYXSTKGG

SEQ ID NO: 741 - protein, 15 aa, Artificial Sequence
  epitope
  misc_feature (1)..(8): Xaa can be any naturally occurring amino acid
  misc_feature (10)..(11): Xaa can be any naturally occurring amino acid
XXXXXXXXYXXTKGG

SEQ ID NO: 742 - protein, 6 aa, Artificial Sequence
  epitope
QSTKGG

SEQ ID NO: 743 - protein, 6 aa, Artificial Sequence
  epitope
  misc_feature (1)..(1): Xaa can be any naturally occurring amino acid
XSTKGG

SEQ ID NO: 744 - protein, 6 aa, Artificial Sequence
  epitope
  misc_feature (1)..(2): Xaa can be any naturally occurring amino acid
XXTKGG

SEQ ID NO: 745 - protein, 4 aa, Artificial Sequence
  epitope
QSTK

SEQ ID NO: 746 - protein, 5 aa, Artificial Sequence
  epitope
QSTKG

SEQ ID NO: 747 - protein, 4 aa, Artificial Sequence
  epitope
QSTK

SEQ ID NO: 748 - protein, 6 aa, Artificial Sequence
  epitope
QSTKGG

SEQ ID NO: 749 - protein, 5 aa, Artificial Sequence
  epitope
QSTKG

SEQ ID NO: 750 - protein, 6 aa, Artificial Sequence
  epitope
QSTKGG

SEQ ID NO: 751 - protein, 5 aa, Artificial Sequence
  epitope
QSTKG

SEQ ID NO: 752 - protein, 6 aa, Artificial Sequence
  epitope
QSTKGG

SEQ ID NO: 753 - protein, 5 aa, Artificial Sequence
  epitope
QSTKG

SEQ ID NO: 754 - protein, 15 aa, Artificial Sequence
  epitope
  misc_feature (1)..(8): Xaa can be any naturally occurring amino acid
  misc_feature (10)..(10): Xaa can be any naturally occurring amino acid
  misc_feature (12)..(12): Xaa can be any naturally occurring amino acid
  misc_feature (15)..(15): Xaa can be any naturally occurring amino acid
XXXXXXXXYXSXKGX

SEQ ID NO: 755 - protein, 10 aa, Artificial Sequence
  epitope
ILFEETLYQS

SEQ ID NO: 756 - protein, 7 aa, Artificial Sequence
  epitope
QSTKGGK

SEQ ID NO: 757 - protein, 6 aa, Artificial Sequence
  epitope
QSTKGG

SEQ ID NO: 758 - protein, 10 aa, Artificial Sequence
  epitope
VILFEETLYQ

SEQ ID NO: 759 - protein, 6 aa, Artificial Sequence
  epitope
QSTKGG

SEQ ID NO: 760 - protein, 5 aa, Artificial Sequence
  epitope
QSTKG

SEQ ID NO: 761 - protein, 15 aa, Artificial Sequence
  epitope
  misc_feature (1)..(1): Xaa can be any naturally occurring amino acid
  misc_feature (3)..(3): Xaa can be any naturally occurring amino acid
  misc_feature (5)..(8): Xaa can be any naturally occurring amino acid
  misc_feature (10)..(10): Xaa can be any naturally occurring amino acid
XIXFXXXXYXSTKGG

SEQ ID NO: 762 - protein, 6 aa, Artificial Sequence
  epitope
QSTKGG

SEQ ID NO: 763 - protein, 6 aa, Artificial Sequence
  epitope
  misc_feature (1)..(1): Xaa can be any naturally occurring amino acid
XSTKGG

SEQ ID NO: 764 - protein, 5 aa, Artificial Sequence
  epitope
QSTKG

SEQ ID NO: 765 - protein, 6 aa, Artificial Sequence
  epitope
QSTKGG

SEQ ID NO: 766 - protein, 15 aa, Artificial Sequence
  epitope
  misc_feature (1)..(8): Xaa can be any naturally occurring amino acid
  misc_feature (10)..(11): Xaa can be any naturally occurring amino acid
  misc_feature (14)..(14): Xaa can be any naturally occurring amino acid
XXXXXXXXYXXTKXG

SEQ ID NO: 767 - protein, 6 aa, Artificial Sequence
  epitope
QSTKGG

SEQ ID NO: 768 - protein, 5 aa, Artificial Sequence
  epitope
QSTKG

SEQ ID NO: 769 - protein, 15 aa, Artificial Sequence
  epitope
  misc_feature (1)..(7): Xaa can be any naturally occurring amino acid
XXXXXXXLYQSTKGG

SEQ ID NO: 770 - protein, 5 aa, Artificial Sequence
  epitope
QSTKG

SEQ ID NO: 771 - protein, 4 aa, Artificial Sequence
  epitope
QSTK

SEQ ID NO: 772 - protein, 15 aa, Artificial Sequence
  epitope
  misc_feature (1)..(8): Xaa can be any naturally occurring amino acid
  misc_feature (10)..(11): Xaa can be any naturally occurring amino acid
XXXXXXXXYXXTKGG

SEQ ID NO: 773 - protein, 10 aa, Artificial Sequence
  epitope
VILFEETLYQ

SEQ ID NO: 774 - protein, 5 aa, Artificial Sequence
  epitope
QSTKG

SEQ ID NO: 775 - protein, 4 aa, Artificial Sequence
  epitope
QSTK

SEQ ID NO: 776 - protein, 15 aa, Artificial Sequence
  epitope
QPYPQPQPFPSQQPY

SEQ ID NO: 777 - protein, 15 aa, Artificial Sequence
  epitope
  misc_feature (1)..(4): Xaa can be any naturally occurring amino acid
  misc_feature (14)..(15): Xaa can be any naturally occurring amino acid
XXXXQPQPFPSQQXX

SEQ ID NO: 778 - protein, 15 aa, Artificial Sequence
  epitope
  misc_feature (1)..(7): Xaa can be any naturally occurring amino acid
  misc_feature (11)..(11): Xaa can be any naturally occurring amino acid
  misc_feature (13)..(15): Xaa can be any naturally occurring amino acid
XXXXXXXPFPXQXXX

SEQ ID NO: 779 - protein, 7 aa, Artificial Sequence
  epitope
PQPQPFP

SEQ ID NO: 780 - protein, 15 aa, Artificial Sequence
  epitope
  misc_feature (4)..(7): Xaa can be any naturally occurring amino acid
  misc_feature (9)..(9): Xaa can be any naturally occurring amino acid
  misc_feature (13)..(13): Xaa can be any naturally occurring amino acid
QPYXXXXPXPSQXPY

SEQ ID NO: 781 - protein, 15 aa, Artificial Sequence
  epitope
  misc_feature (1)..(1): Xaa can be any naturally occurring amino acid
  misc_feature (4)..(9): Xaa can be any naturally occurring amino acid
  misc_feature (11)..(11): Xaa can be any naturally occurring amino acid
  misc_feature (13)..(14): Xaa can be any naturally occurring amino acid
XPYXXXXXXPXQXXY

SEQ ID NO: 782 - protein, 9 aa, Artificial Sequence
  epitope
PQPQPFPSQ

SEQ ID NO: 783 - protein, 9 aa, Artificial Sequence
  epitope
  misc_feature (1)..(4): Xaa can be any naturally occurring amino acid
  misc_feature (6)..(6): Xaa can be any naturally occurring amino acid
XXXXPXPSQ

SEQ ID NO: 784 - protein, 7 aa, Artificial Sequence
  epitope
PQPQPFP

SEQ ID NO: 785 - protein, 4 aa, Artificial Sequence
  epitope
QPFP

SEQ ID NO: 786 - protein, 15 aa, Artificial Sequence
  epitope
  misc_feature (1)..(1): Xaa can be any naturally occurring amino acid
  misc_feature (4)..(4): Xaa can be any naturally occurring amino acid
  misc_feature (7)..(7): Xaa can be any naturally occurring amino acid
  misc_feature (12)..(15): Xaa can be any naturally occurring amino acid
XPYXQPXPFPSXXXX

SEQ ID NO: 787 - protein, 15 aa, Artificial Sequence
  epitope
  misc_feature (1)..(4): Xaa can be any naturally occurring amino acid
  misc_feature (7)..(9): Xaa can be any naturally occurring amino acid
  misc_feature (12)..(15): Xaa can be any naturally occurring amino acid
XXXXQPXXXPSXXXX

SEQ ID NO: 788 - protein, 6 aa, Artificial Sequence
  epitope
QPQPFP

SEQ ID NO: 789 - protein, 5 aa, Artificial Sequence
  epitope
QPQPF

SEQ ID NO: 790 - protein, 5 aa, Artificial Sequence
  epitope
  misc_feature (3)..(3): Xaa can be any naturally occurring amino acid
QPXPF

SEQ ID NO: 791 - protein, 15 aa, Artificial Sequence
  epitope
  misc_feature (1)..(1): Xaa can be any naturally occurring amino acid
  misc_feature (4)..(4): Xaa can be any naturally occurring amino acid
  misc_feature (7)..(8): Xaa can be any naturally occurring amino acid
  misc_feature (13)..(13): Xaa can be any naturally occurring amino acid
XPYXQPXXFPSQXPY

SEQ ID NO: 792 - protein, 15 aa, Artificial Sequence
  epitope
  misc_feature (1)..(2): Xaa can be any naturally occurring amino acid
  misc_feature (4)..(4): Xaa can be any naturally occurring amino acid
  misc_feature (6)..(9): Xaa can be any naturally occurring amino acid
  misc_feature (13)..(13): Xaa can be any naturally occurring amino acid
XXYXQXXXXPSQXPY

SEQ ID NO: 793 - protein, 10 aa, Artificial Sequence
  epitope
YPQPQPFPSQ

SEQ ID NO: 794 - protein, 9 aa, Artificial Sequence
  epitope
PQPQPFPSQ

SEQ ID NO: 795 - protein, 9 aa, Artificial Sequence
  epitope
  misc_feature (1)..(1): Xaa can be any naturally occurring amino acid
  misc_feature (4)..(5): Xaa can be any naturally occurring amino acid
XQPXXFPSQ

SEQ ID NO: 796 - protein, 9 aa, Artificial Sequence
  epitope
  misc_feature (1)..(1): Xaa can be any naturally occurring amino acid
  misc_feature (3)..(6): Xaa can be any naturally occurring amino acid
XQXXXXPSQ

SEQ ID NO: 797 - protein, 10 aa, Artificial Sequence
  epitope
PQPFPSQQPY

SEQ ID NO: 798 - protein, 10 aa, Artificial Sequence
  epitope
PFPSQQPYLQ

SEQ ID NO: 799 - protein, 7 aa, Artificial Sequence
  epitope
FPSQQPY

SEQ ID NO: 800 - protein, 7 aa, Artificial Sequence
  epitope
  misc_feature (5)..(5): Xaa can be any naturally occurring amino acid
FPSQXPY

SEQ ID NO: 801 - protein, 7 aa, Artificial Sequence
  epitope
  misc_feature (1)..(1): Xaa can be any naturally occurring amino acid
  misc_feature (5)..(5): Xaa can be any naturally occurring amino acid
XPSQXPY

SEQ ID NO: 802 - protein, 15 aa, Artificial Sequence
  epitope
  misc_feature (4)..(5): Xaa can be any naturally occurring amino acid
QPYXXPQPFPSQQPY

SEQ ID NO: 803 - protein, 15 aa, Artificial Sequence
  epitope
  misc_feature (1)..(1): Xaa can be any naturally occurring amino acid
  misc_feature (4)..(5): Xaa can be any naturally occurring amino acid
XPYXXPQPFPSQQPY

SEQ ID NO: 804 - protein, 7 aa, Artificial Sequence
  epitope
PQPQPFP

SEQ ID NO: 805 - protein, 7 aa, Artificial Sequence
  epitope
  misc_feature (1)..(2): Xaa can be any naturally occurring amino acid
XXPQPFP

SEQ ID NO: 806 - protein, 15 aa, Artificial Sequence
  epitope
  misc_feature (1)..(1): Xaa can be any naturally occurring amino acid
  misc_feature (4)..(8): Xaa can be any naturally occurring amino acid
  misc_feature (14)..(15): Xaa can be any naturally occurring amino acid
XPYXXXXXFPSQQXX

SEQ ID NO: 807 - protein, 15 aa, Artificial Sequence
  epitope
  misc_feature (1)..(2): Xaa can be any naturally occurring amino acid
  misc_feature (4)..(9): Xaa can be any naturally occurring amino acid
  misc_feature (14)..(15): Xaa can be any naturally occurring amino acid
XXYXXXXXXPSQQXX

SEQ ID NO: 808 - protein, 7 aa, Artificial Sequence
  epitope
PQPQPFP

SEQ ID NO: 809 - protein, 5 aa, Artificial Sequence
  epitope
QPQPF

SEQ ID NO: 810 - protein, 15 aa, Artificial Sequence
  epitope
  misc_feature (1)..(2): Xaa can be any naturally occurring amino acid
  misc_feature (4)..(6): Xaa can be any naturally occurring amino acid
  misc_feature (9)..(9): Xaa can be any naturally occurring amino acid
  misc_feature (11)..(11): Xaa can be any naturally occurring amino acid
  misc_feature (14)..(15): Xaa can be any naturally occurring amino acid
XXYXXXQPXPXQQXX

SEQ ID NO: 811 - protein, 7 aa, Artificial Sequence
  epitope
PQPQPFP

SEQ ID NO: 812 - protein, 15 aa, Artificial Sequence
  epitope
  misc_feature (9)..(9): Xaa can be any naturally occurring amino acid
QPYPQPQPXPSQQPY

SEQ ID NO: 813 - protein, 15 aa, Artificial Sequence
  epitope
  misc_feature (1)..(2): Xaa can be any naturally occurring amino acid
  misc_feature (4)..(6): Xaa can be any naturally occurring amino acid
  misc_feature (9)..(9): Xaa can be any naturally occurring amino acid
  misc_feature (14)..(14): Xaa can be any naturally occurring amino acid
XXYXXXQPXPSQQXY

SEQ ID NO: 814 - protein, 9 aa, Artificial Sequence
  epitope
PQPQPFPSQ

SEQ ID NO: 815 - protein, 7 aa, Artificial Sequence
  epitope
QPQPFPS

SEQ ID NO: 816 - protein, 7 aa, Artificial Sequence
  epitope
  misc_feature (5)..(5): Xaa can be any naturally occurring amino acid
QPQPXPS

SEQ ID NO: 817 - protein, 7 aa, Artificial Sequence
  epitope
  misc_feature (1)..(2): Xaa can be any naturally occurring amino acid
  misc_feature (5)..(5): Xaa can be any naturally occurring amino acid
XXQPXPS

SEQ ID NO: 818 - protein, 15 aa, Artificial Sequence
  epitope
  misc_feature (1)..(2): Xaa can be any naturally occurring amino acid
  misc_feature (4)..(4): Xaa can be any naturally occurring amino acid
  misc_feature (6)..(9): Xaa can be any naturally occurring amino acid
  misc_feature (14)..(14): Xaa can be any naturally occurring amino acid
XXYXQXXXXPSQQXY

SEQ ID NO: 819 - protein, 6 aa, Artificial Sequence
  epitope
QPFPSQ

SEQ ID NO: 820 - protein, 15 aa, Artificial Sequence
  epitope
  misc_feature (1)..(1): Xaa can be any naturally occurring amino acid
  misc_feature (4)..(4): Xaa can be any naturally occurring amino acid
  misc_feature (9)..(9): Xaa can be any naturally occurring amino acid
  misc_feature (14)..(14): Xaa can be any naturally occurring amino acid
XPYXQPQPXPSQQXY

SEQ ID NO: 821 - protein, 15 aa, Artificial Sequence
  epitope
  misc_feature (1)..(7): Xaa can be any naturally occurring amino acid
  misc_feature (9)..(9): Xaa can be any naturally occurring amino acid
  misc_feature (14)..(14): Xaa can be any naturally occurring amino acid
XXXXXXXPXPSQQXY

SEQ ID NO: 822 - protein, 10 aa, Artificial Sequence
  epitope
YPQPQPFPSQ

SEQ ID NO: 823 - protein, 9 aa, Artificial Sequence
  epitope
PQPQPFPSQ

SEQ ID NO: 824 - protein, 9 aa, Artificial Sequence
  epitope
  misc_feature (1)..(1): Xaa can be any naturally occurring amino acid
  misc_feature (6)..(6): Xaa can be any naturally occurring amino acid
XQPQPXPSQ

SEQ ID NO: 825 - protein, 9 aa, Artificial Sequence
  epitope
  misc_feature (1)..(4): Xaa can be any naturally occurring amino acid
  misc_feature (6)..(6): Xaa can be any naturally occurring amino acid
XXXXPXPSQ

SEQ ID NO: 826 - protein, 15 aa, Artificial Sequence
  epitope
  misc_feature (1)..(2): Xaa can be any naturally occurring amino acid
  misc_feature (4)..(9): Xaa can be any naturally occurring amino acid
  misc_feature (14)..(15): Xaa can be any naturally occurring amino acid
XXYXXXXXXPSQQXX

SEQ ID NO: 827 - protein, 8 aa, Artificial Sequence
  epitope
YPQPQPFP

SEQ ID NO: 828 - protein, 10 aa, Artificial Sequence
  epitope
QPFPSQQPYL

SEQ ID NO: 829 - protein, 10 aa, Artificial Sequence
  epitope
  misc_feature (1)..(3): Xaa can be any naturally occurring amino acid
  misc_feature (8)..(9): Xaa can be any naturally occurring amino acid
XXXPSQQXXL

SEQ ID NO: 830 - protein, 15 aa, Artificial Sequence
  epitope
  misc_feature (4)..(4): Xaa can be any naturally occurring amino acid
  misc_feature (6)..(6): Xaa can be any naturally occurring amino acid
  misc_feature (9)..(9): Xaa can be any naturally occurring amino acid
  misc_feature (14)..(15): Xaa can be any naturally occurring amino acid
QPYXQXQPXPSQQXX

SEQ ID NO: 831 - protein, 15 aa, Artificial Sequence
  epitope
  misc_feature (1)..(2): Xaa can be any naturally occurring amino acid
  misc_feature (4)..(6): Xaa can be any naturally occurring amino acid
  misc_feature (8)..(9): Xaa can be any naturally occurring amino acid
  misc_feature (14)..(15): Xaa can be any naturally occurring amino acid
XXYXXXQXXPSQQXX

SEQ ID NO: 832 - protein, 7 aa, Artificial Sequence
  epitope
PQPQPFP

SEQ ID NO: 833 - protein, 5 aa, Artificial Sequence
  epitope
QPQPF

SEQ ID NO: 834 - protein, 15 aa, Artificial Sequence
  epitope
  misc_feature (1)..(1): Xaa can be any naturally occurring amino acid
  misc_feature (3)..(4): Xaa can be any naturally occurring amino acid
  misc_feature (8)..(8): Xaa can be any naturally occurring amino acid
  misc_feature (11)..(11): Xaa can be any naturally occurring amino acid
  misc_feature (14)..(15): Xaa can be any naturally occurring amino acid
XPXXQPQXFPXQQXX

SEQ ID NO: 835 - protein, 15 aa, Artificial Sequence
  epitope
  misc_feature (1)..(1): Xaa can be any naturally occurring amino acid
  misc_feature (4)..(5): Xaa can be any naturally occurring amino acid
  misc_feature (13)..(15): Xaa can be any naturally occurring amino acid
XPYXXPQPFPSQXXX

SEQ ID NO: 836 - protein, 15 aa, Artificial Sequence
  epitope
  misc_feature (1)..(2): Xaa can be any naturally occurring amino acid
  misc_feature (4)..(6): Xaa can be any naturally occurring amino acid
  misc_feature (9)..(9): Xaa can be any naturally occurring amino acid
  misc_feature (12)..(15): Xaa can be any naturally occurring amino acid
XXYXXXQPXPSXXXX

SEQ ID NO: 837 - protein, 8 aa, Artificial Sequence
  epitope
PQPQPFPS

SEQ ID NO: 838 - protein, 7 aa, Artificial Sequence
  epitope
QPQPFPS

SEQ ID NO: 839 - protein, 7 aa, Artificial Sequence
  epitope
  misc_feature (1)..(1): Xaa can be any naturally occurring amino acid
XPQPFPS

SEQ ID NO: 840 - protein, 7 aa, Artificial Sequence
  epitope
  misc_feature (1)..(2): Xaa can be any naturally occurring amino acid
  misc_feature (5)..(5): Xaa can be any naturally occurring amino acid
XXQPXPS

SEQ ID NO: 841 - protein, 4 aa, Artificial Sequence
  epitope
PQPF

SEQ ID NO: 842 - protein, 15 aa, Artificial Sequence
  epitope
  misc_feature (1)..(2): Xaa can be any naturally occurring amino acid
  misc_feature (4)..(7): Xaa can be any naturally occurring amino acid
  misc_feature (9)..(9): Xaa can be any naturally occurring amino acid
XXYXXXXPXPSQQPY

SEQ ID NO: 843 - protein, 15 aa, Artificial Sequence
  epitope
  misc_feature (1)..(2): Xaa can be any naturally occurring amino acid
  misc_feature (4)..(9): Xaa can be any naturally occurring amino acid
  misc_feature (14)..(14): Xaa can be any naturally occurring amino acid
XXYXXXXXXPSQQXY

SEQ ID NO: 844 - protein, 7 aa, Artificial Sequence
  epitope
PQPQPFP

SEQ ID NO: 845 - protein, 6 aa, Artificial Sequence
  epitope
PQPQPF

SEQ ID NO: 846 - protein, 15 aa, Artificial Sequence
  epitope
  misc_feature (4)..(4): Xaa can be any naturally occurring amino acid
QPYXQPQPFPSQQPY

SEQ ID NO: 847 - protein, 15 aa, Artificial Sequence
  epitope
  misc_feature (1)..(1): Xaa can be any naturally occurring amino acid
  misc_feature (4)..(4): Xaa can be any naturally occurring amino acid
XPYXQPQPFPSQQPY

SEQ ID NO: 848 - protein, 5 aa, Artificial Sequence
  epitope
QPFPS

SEQ ID NO: 849 - protein, 15 aa, Artificial Sequence
  epitope
  misc_feature (4)..(5): Xaa can be any naturally occurring amino acid
  misc_feature (11)..(11): Xaa can be any naturally occurring amino acid
  misc_feature (14)..(14): Xaa can be any naturally occurring amino acid
QPYXXPQPFPXQQXY

SEQ ID NO: 850 - protein, 15 aa, Artificial Sequence
  epitope
  misc_feature (4)..(7): Xaa can be any naturally occurring amino acid
  misc_feature (9)..(9): Xaa can be any naturally occurring amino acid
  misc_feature (11)..(11): Xaa can be any naturally occurring amino acid
  misc_feature (14)..(15): Xaa can be any naturally occurring amino acid
QPYXXXXPXPXQQXX

SEQ ID NO: 851 - protein, 7 aa, Artificial Sequence
  epitope
PQPQPFP

SEQ ID NO: 852 - protein, 6 aa, Artificial Sequence
  epitope
QPQPFP

SEQ ID NO: 853 - protein, 6 aa, Artificial Sequence
  epitope
  misc_feature (1)..(1): Xaa can be any naturally occurring amino acid
XPQPFP

SEQ ID NO: 854 - protein, 15 aa, Artificial Sequence
  epitope
  misc_feature (1)..(1): Xaa can be any naturally occurring amino acid
  misc_feature (4)..(4): Xaa can be any naturally occurring amino acid
  misc_feature (12)..(12): Xaa can be any naturally occurring amino acid
XPYXQPQPFPSXQPY

SEQ ID NO: 855 - protein, 15 aa, Artificial Sequence
  epitope
  misc_feature (1)..(2): Xaa can be any naturally occurring amino acid
  misc_feature (4)..(4): Xaa can be any naturally occurring amino acid
  misc_feature (12)..(12): Xaa can be any naturally occurring amino acid
XXYXQPQPFPSXQPY

SEQ ID NO: 856 - protein, 9 aa, Artificial Sequence
  epitope
YPQPQPFPS

SEQ ID NO: 857 - protein, 7 aa, Artificial Sequence
  epitope
PQPQPFP

SEQ ID NO: 858 - protein, 7 aa, Artificial Sequence
  epitope
  misc_feature (1)..(1): Xaa can be any naturally occurring amino acid
XQPQPFP

SEQ ID NO: 859 - protein, 15 aa, Artificial Sequence
  epitope
  misc_feature (1)..(1): Xaa can be any naturally occurring amino acid
  misc_feature (4)..(4): Xaa can be any naturally occurring amino acid
XPYXQPQPFPSQQPY

SEQ ID NO: 860 - protein, 15 aa, Artificial Sequence
  epitope
  misc_feature (1)..(2): Xaa can be any naturally occurring amino acid
  misc_feature (4)..(7): Xaa can be any naturally occurring amino acid
  misc_feature (11)..(11): Xaa can be any naturally occurring amino acid
XXYXXXXPFPXQQPY

SEQ ID NO: 861 - protein, 9 aa, Artificial Sequence
  epitope
YPQPQPFPS

SEQ ID NO: 862 - protein, 7 aa, Artificial Sequence
  epitope
PQPQPFP

SEQ ID NO: 863 - protein, 7 aa, Artificial Sequence
  epitope
  misc_feature (1)..(1): Xaa can be any naturally occurring amino acid
XQPQPFP

SEQ ID NO: 864 - protein, 15 aa, Artificial Sequence
  epitope
  misc_feature (1)..(2): Xaa can be any naturally occurring amino acid
  misc_feature (4)..(5): Xaa can be any naturally occurring amino acid
  misc_feature (14)..(14): Xaa can be any naturally occurring amino acid
XXYXXPQPFPSQQXY

SEQ ID NO: 865 - protein, 15 aa, Artificial Sequence
  epitope
  misc_feature (1)..(9): Xaa can be any naturally occurring amino acid
  misc_feature (11)..(11): Xaa can be any naturally occurring amino acid
  misc_feature (14)..(14): Xaa can be any naturally occurring amino acid
XXXXXXXXXPXQQXY

SEQ ID NO: 866 - protein, 8 aa, Artificial Sequence
  epitope
QPQPFPSQ

SEQ ID NO: 867 - protein, 5 aa, Artificial Sequence
  epitope
QPQPF

SEQ ID NO: 868 - protein, 5 aa, Artificial Sequence
  epitope
  misc_feature (1)..(1): Xaa can be any naturally occurring amino acid
XPQPF

SEQ ID NO: 869 - protein, 15 aa, Artificial Sequence
  epitope
  misc_feature (1)..(1): Xaa can be any naturally occurring amino acid
  misc_feature (4)..(5): Xaa can be any naturally occurring amino acid
  misc_feature (9)..(10): Xaa can be any naturally occurring amino acid
  misc_feature (14)..(15): Xaa can be any naturally occurring amino acid
XPYXXPQPXXSQQXX

SEQ ID NO: 870 - protein, 6 aa, Artificial Sequence
  epitope
PQPQPF

SEQ ID NO: 871 - protein, 15 aa, Artificial Sequence
  epitope
  misc_feature (3)..(3): Xaa can be any naturally occurring amino acid
  misc_feature (11)..(11): Xaa can be any naturally occurring amino acid
QPXPQPQPFPXQQPY

SEQ ID NO: 872 - protein, 15 aa, Artificial Sequence
  epitope
  misc_feature (3)..(5): Xaa can be any naturally occurring amino acid
  misc_feature (11)..(11): Xaa can be any naturally occurring amino acid
QPXXXPQPFPXQQPY

SEQ ID NO: 873 - protein, 9 aa, Artificial Sequence
  epitope
PYPQPQPFP

SEQ ID NO: 874 - protein, 9 aa, Artificial Sequence
  epitope
  misc_feature (2)..(4): Xaa can be any naturally occurring amino acid
PXXXPQPFP

SEQ ID NO: 875 - protein, 5 aa, Artificial Sequence
  epitope
PQPQP

SEQ ID NO: 876 - protein, 15 aa, Artificial Sequence
  epitope
  misc_feature (1)..(2): Xaa can be any naturally occurring amino acid
  misc_feature (4)..(5): Xaa can be any naturally occurring amino acid
  misc_feature (7)..(7): Xaa can be any naturally occurring amino acid
  misc_feature (14)..(14): Xaa can be any naturally occurring amino acid
XXYXXPXPFPSQQXY

SEQ ID NO: 877 - protein, 10 aa, Artificial Sequence
  epitope
YPQPQPFPSQ

SEQ ID NO: 878 - protein, 10 aa, Artificial Sequence
  epitope
  misc_feature (2)..(3): Xaa can be any naturally occurring amino acid
  misc_feature (5)..(5): Xaa can be any naturally occurring amino acid
YXXPXPFPSQ

SEQ ID NO: 879 - protein, 8 aa, Artificial Sequence
  epitope
QPFPSQQP

SEQ ID NO: 880 - protein, 8 aa, Artificial Sequence
  epitope
  misc_feature (1)..(1): Xaa can be any naturally occurring amino acid
  misc_feature (8)..(8): Xaa can be any naturally occurring amino acid
XPFPSQQX

SEQ ID NO: 881 - protein, 15 aa, Artificial Sequence
  epitope
  misc_feature (1)..(2): Xaa can be any naturally occurring amino acid
  misc_feature (4)..(6): Xaa can be any naturally occurring amino acid
  misc_feature (15)..(15): Xaa can be any naturally occurring amino acid
XXYXXXQPFPSQQPX

SEQ ID NO: 882 - protein, 4 aa, Artificial Sequence
  epitope
QPQP

SEQ ID NO: 883 - protein, 15 aa, Artificial Sequence
  epitope
  misc_feature (2)..(2): Xaa can be any naturally occurring amino acid
  misc_feature (4)..(4): Xaa can be any naturally occurring amino acid
  misc_feature (7)..(7): Xaa can be any naturally occurring amino acid
  misc_feature (10)..(15): Xaa can be any naturally occurring amino acid
QXYXQPXPFXXXXXX

SEQ ID NO: 884 - protein, 15 aa, Artificial Sequence
  epitope
  misc_feature (1)..(4): Xaa can be any naturally occurring amino acid
  misc_feature (7)..(7): Xaa can be any naturally occurring amino acid
  misc_feature (10)..(15): Xaa can be any naturally occurring amino acid
XXXXQPXPFXXXXXX

SEQ ID NO: 885 - protein, 6 aa, Artificial Sequence
  epitope
PQPFPS

SEQ ID NO: 886 - protein, 15 aa, Artificial Sequence
  epitope
  misc_feature (1)..(1): Xaa can be any naturally occurring amino acid
  misc_feature (4)..(5): Xaa can be any naturally occurring amino acid
  misc_feature (13)..(15): Xaa can be any naturally occurring amino acid
XPYXXPQPFPSQXXX

SEQ ID NO: 887 - protein, 15 aa, Artificial Sequence
  epitope
  misc_feature (1)..(1): Xaa can be any naturally occurring amino acid
  misc_feature (4)..(5): Xaa can be any naturally occurring amino acid
  misc_feature (11)..(15): Xaa can be any naturally occurring amino acid
XPYXXPQPFPXXXXX

SEQ ID NO: 888 - protein, 7 aa, Artificial Sequence
  epitope
PQPQPFP

SEQ ID NO: 889 - protein, 7 aa, Artificial Sequence
  epitope
  misc_feature (1)..(2): Xaa can be any naturally occurring amino acid
XXPQPFP

SEQ ID NO: 890 - protein, 15 aa, Artificial Sequence
  epitope
  misc_feature (12)..(12): Xaa can be any naturally occurring amino acid
  misc_feature (15)..(15): Xaa can be any naturally occurring amino acid
QPYPQPQPFPSXQPX

SEQ ID NO: 891 - protein, 15 aa, Artificial Sequence
  epitope
  misc_feature (1)..(1): Xaa can be any naturally occurring amino acid
  misc_feature (7)..(7): Xaa can be any naturally occurring amino acid
  misc_feature (12)..(12): Xaa can be any naturally occurring amino acid
  misc_feature (14)..(15): Xaa can be any naturally occurring amino acid
XPYPQPXPFPSXQXX

SEQ ID NO: 892 - protein, 4 aa, Artificial Sequence
  epitope
YPQP

SEQ ID NO: 893 - protein, 15 aa, Artificial Sequence
  epitope
  misc_feature (1)..(2): Xaa can be any naturally occurring amino acid
  misc_feature (4)..(5): Xaa can be any naturally occurring amino acid
  misc_feature (7)..(8): Xaa can be any naturally occurring amino acid
  misc_feature (10)..(11): Xaa can be any naturally occurring amino acid
XXYXXPXXFXXQQPY

SEQ ID NO: 894 - protein, 15 aa, Artificial Sequence
  epitope
  misc_feature (1)..(11): Xaa can be any naturally occurring amino acid
XXXXXXXXXXXQQPY

SEQ ID NO: 895 - protein, 7 aa, Artificial Sequence
  epitope
PQPQPFP

SEQ ID NO: 896 - protein, 6 aa, Artificial Sequence
  epitope
PQPQPF

SEQ ID NO: 897 - protein, 6 aa, Artificial Sequence
  epitope
PSQQPY

SEQ ID NO: 898 - protein, 6 aa, Artificial Sequence
  epitope
  misc_feature (1)..(2): Xaa can be any naturally occurring amino acid
XXQQPY

SEQ ID NO: 899 - protein, 15 aa, Artificial Sequence
  epitope
LGQQQQQFPGQQQPF

SEQ ID NO: 900 - protein, 15 aa, Artificial Sequence
  epitope
  misc_feature (1)..(4): Xaa can be any naturally occurring amino acid
  misc_feature (8)..(10): Xaa can be any naturally occurring amino acid
  misc_feature (14)..(15): Xaa can be any naturally occurring amino acid
XXXXQQQXXXQQQXX

SEQ ID NO: 901 - protein, 10 aa, Artificial Sequence
  epitope
LGQQQQQFPG

SEQ ID NO: 902 - protein, 10 aa, Artificial Sequence
  epitope
QQQQFPGQQQ

SEQ ID NO: 903 - protein, 10 aa, Artificial Sequence
  epitope
  misc_feature (1)..(1): Xaa can be any naturally occurring amino acid
  misc_feature (5)..(7): Xaa can be any naturally occurring amino acid
XQQQXXXQQQ

SEQ ID NO: 904 - protein, 10 aa, Artificial Sequence
  epitope
QQFPGQQQPF

SEQ ID NO: 905 - protein, 10 aa, Artificial Sequence
  epitope
  misc_feature (3)..(5): Xaa can be any naturally occurring amino acid
  misc_feature (9)..(10): Xaa can be any naturally occurring amino acid
QQXXXQQQXX

SEQ ID NO: 906 - protein, 15 aa, Artificial Sequence
  epitope
  misc_feature (1)..(2): Xaa can be any naturally occurring amino acid
  misc_feature (8)..(11): Xaa can be any naturally occurring amino acid
  misc_feature (13)..(15): Xaa can be any naturally occurring amino acid
XXQQQQQXXXXQXXX

SEQ ID NO: 907 - protein, 10 aa, Artificial Sequence
  epitope
QQQQQFPGQQ

SEQ ID NO: 908 - protein, 8 aa, Artificial Sequence
  epitope
QQQQFPGQ

SEQ ID NO: 909 - protein, 8 aa, Artificial Sequence
  epitope
  misc_feature (5)..(8): Xaa can be any naturally occurring amino acid
QQQQXXXX

SEQ ID NO: 910 - protein, 10 aa, Artificial Sequence
  epitope
QQFPGQQQPF

SEQ ID NO: 911 - protein, 4 aa, Artificial Sequence
  epitope
QFPG

SEQ ID NO: 912 - protein, 15 aa, Artificial Sequence
  epitope
  misc_feature (1)..(2): Xaa can be any naturally occurring amino acid
  misc_feature (6)..(6): Xaa can be any naturally occurring amino acid
  misc_feature (8)..(8): Xaa can be any naturally occurring amino acid
  misc_feature (10)..(11): Xaa can be any naturally occurring amino acid
  misc_feature (13)..(15): Xaa can be any naturally occurring amino acid
XXQQQXQXPXXQXXX

SEQ ID NO: 913 - protein, 9 aa, Artificial Sequence
  epitope
QQFLGQQQQ

SEQ ID NO: 914 - protein, 9 aa, Artificial Sequence
  epitope
  misc_feature (4)..(5): Xaa can be any naturally occurring amino acid
  misc_feature (9)..(9): Xaa can be any naturally occurring amino acid
QQFXXQQQX

SEQ ID NO: 915 - protein, 9 aa, Artificial Sequence
  epitope
QQQFPGQQQ

SEQ ID NO: 916 - protein, 9 aa, Artificial Sequence
  epitope
  misc_feature (2)..(2): Xaa can be any naturally occurring amino acid
  misc_feature (4)..(4): Xaa can be any naturally occurring amino acid
  misc_feature (6)..(7): Xaa can be any naturally occurring amino acid
  misc_feature (9)..(9): Xaa can be any naturally occurring amino acid
QXQXPXXQX

SEQ ID NO: 917 - protein, 5 aa, Artificial Sequence
  epitope
QQFPG

SEQ ID NO: 918 - protein, 15 aa, Artificial Sequence
  epitope
  misc_feature (2)..(2): Xaa can be any naturally occurring amino acid
  misc_feature (6)..(15): Xaa can be any naturally occurring amino acid
LXQQQXXXXXXXXXX

SEQ ID NO: 919 - protein, 10 aa, Artificial Sequence
  epitope
LGQQQQQFPG

SEQ ID NO: 920 - protein, 10 aa, Artificial Sequence
  epitope
QQQQQFPGQQ

SEQ ID NO: 921 - protein, 10 aa, Artificial Sequence
  epitope
QQFPGQQQPF

SEQ ID NO: 922 - protein, 15 aa, Artificial Sequence
  epitope
  misc_feature (1)..(3): Xaa can be any naturally occurring amino acid
  misc_feature (8)..(11): Xaa can be any naturally occurring amino acid
  misc_feature (13)..(15): Xaa can be any naturally occurring amino acid
XXXQQQQXXXXQXXX

SEQ ID NO: 923 - protein, 10 aa, Artificial Sequence
  epitope
LGQQQQQFPG

SEQ ID NO: 924 - protein, 10 aa, Artificial Sequence
  epitope
  misc_feature (1)..(3): Xaa can be any naturally occurring amino acid
  misc_feature (8)..(10): Xaa can be any naturally occurring amino acid
XXXQQQQXXX

SEQ ID NO: 925 - protein, 8 aa, Artificial Sequence
  epitope
QQFPGQQQ

SEQ ID NO: 926 - protein, 5 aa, Artificial Sequence
  epitope
FPGQQ

SEQ ID NO: 927 - protein, 15 aa, Artificial Sequence
  epitope
  misc_feature (1)..(2): Xaa can be any naturally occurring amino acid
  misc_feature (8)..(10): Xaa can be any naturally occurring amino acid
  misc_feature (13)..(15): Xaa can be any naturally occurring amino acid
XXQQQQQXXXQQXXX

SEQ ID NO: 928 - protein, 15 aa, Artificial Sequence
  epitope
  misc_feature (1)..(4): Xaa can be any naturally occurring amino acid
  misc_feature (8)..(11): Xaa can be any naturally occurring amino acid
  misc_feature (13)..(15): Xaa can be any naturally occurring amino acid
XXXXQQQXXXXQXXX

SEQ ID NO: 929 - protein, 8 aa, Artificial Sequence
  epitope
QQFPGQQQ

SEQ ID NO: 930 - protein, 7 aa, Artificial Sequence
  epitope
QQFPGQQ

SEQ ID NO: 931 - protein, 15 aa, Artificial Sequence
  epitope
  misc_feature (1)..(2): Xaa can be any naturally occurring amino acid
  misc_feature (8)..(11): Xaa can be any naturally occurring amino acid
  misc_feature (14)..(15): Xaa can be any naturally occurring amino acid
XXQQQQQXXXXQQXX

SEQ ID NO: 932 - protein, 15 aa, Artificial Sequence
  epitope
  misc_feature (1)..(4): Xaa can be any naturally occurring amino acid
  misc_feature (8)..(11): Xaa can be any naturally occurring amino acid
  misc_feature (14)..(15): Xaa can be any naturally occurring amino acid
XXXXQQQXXXXQQXX

SEQ ID NO: 933 - protein, 10 aa, Artificial Sequence
  epitope
QQQFPGQQQP

SEQ ID NO: 934 - protein, 8 aa, Artificial Sequence
  epitope
QQFPGQQQ

SEQ ID NO: 935 - protein, 8 aa, Artificial Sequence
  epitope
  misc_feature (3)..(6): Xaa can be any naturally occurring amino acid
QQXXXXQQ

SEQ ID NO: 936 - protein, 15 aa, Artificial Sequence
  epitope
  misc_feature (2)..(4): Xaa can be any naturally occurring amino acid
  misc_feature (7)..(11): Xaa can be any naturally occurring amino acid
  misc_feature (13)..(15): Xaa can be any naturally occurring amino acid
LXXXQQXXXXXQXXX

SEQ ID NO: 937 - protein, 10 aa, Artificial Sequence
  epitope
LGQQQQQFPG

SEQ ID NO: 938 - protein, 9 aa, Artificial Sequence
  epitope
QQQFPGQQQ

SEQ ID NO: 939 - protein, 8 aa, Artificial Sequence
  epitope
QQFPGQQQ

SEQ ID NO: 940 - protein, 7 aa, Artificial Sequence
  epitope
QQFPGQQ

SEQ ID NO: 941 - protein, 15 aa, Artificial Sequence
  epitope
  misc_feature (2)..(2): Xaa can be any naturally occurring amino acid
  misc_feature (8)..(11): Xaa can be any naturally occurring amino acid
  misc_feature (14)..(15): Xaa can be any naturally occurring amino acid
LXQQQQQXXXXQQXX

SEQ ID NO: 942 - protein, 15 aa, Artificial Sequence
  epitope
  misc_feature (1)..(3): Xaa can be any naturally occurring amino acid
  misc_feature (6)..(6): Xaa can be any naturally occurring amino acid
  misc_feature (8)..(11): Xaa can be any naturally occurring amino acid
  misc_feature (13)..(15): Xaa can be any naturally occurring amino acid
XXXQQXQXXXXQXXX

SEQ ID NO: 943 - protein, 10 aa, Artificial Sequence
  epitope
QQQQFPGQQQ

SEQ ID NO: 944 - protein, 7 aa, Artificial Sequence
  epitope
QQQQFPG

SEQ ID NO: 945 - protein, 7 aa, Artificial Sequence
  epitope
  misc_feature (5)..(7): Xaa can be any naturally occurring amino acid
QQQQXXX

SEQ ID NO: 946 - protein, 10 aa, Artificial Sequence
  epitope
QQFPGQQQPF

SEQ ID NO: 947 - protein, 9 aa, Artificial Sequence
  epitope
QFPGQQQPF

SEQ ID NO: 948 - protein, 15 aa, Artificial Sequence
  epitope
  misc_feature (1)..(3): Xaa can be any naturally occurring amino acid
  misc_feature (6)..(6): Xaa can be any naturally occurring amino acid
  misc_feature (8)..(10): Xaa can be any naturally occurring amino acid
  misc_feature (13)..(15): Xaa can be any naturally occurring amino acid
XXXQQXQXXXQQXXX

SEQ ID NO: 949 - protein, 9 aa, Artificial Sequence
  epitope
QFPGQQQPF

SEQ ID NO: 950 - protein, 7 aa, Artificial Sequence
  epitope
QFPGQQQ

SEQ ID NO: 951 - protein, 7 aa, Artificial Sequence
  epitope
QQFPGQQ

SEQ ID NO: 952 - protein, 5 aa, Artificial Sequence
  epitope
QQFPG

SEQ ID NO: 953 - protein, 15 aa, Artificial Sequence
  epitope
  misc_feature (1)..(5): Xaa can be any naturally occurring amino acid
  misc_feature (7)..(7): Xaa can be any naturally occurring amino acid
  misc_feature (14)..(15): Xaa can be any naturally occurring amino acid
XXXXXQXFPGQQQXX

SEQ ID NO: 954 - protein, 15 aa, Artificial Sequence
  epitope
  misc_feature (1)..(5): Xaa can be any naturally occurring amino acid
  misc_feature (7)..(8): Xaa can be any naturally occurring amino acid
  misc_feature (12)..(12): Xaa can be any naturally occurring amino acid
  misc_feature (14)..(15): Xaa can be any naturally occurring amino acid
XXXXXQXXPGQXQXX

SEQ ID NO: 955 - protein, 15 aa, Artificial Sequence
  epitope
  misc_feature (1)..(5): Xaa can be any naturally occurring amino acid
  misc_feature (7)..(8): Xaa can be any naturally occurring amino acid
  misc_feature (12)..(15): Xaa can be any naturally occurring amino acid
XXXXXQXXPGQXXXX

SEQ ID NO: 956 - protein, 8 aa, Artificial Sequence
  epitope
QQFPGQQQ

SEQ ID NO: 957 - protein, 8 aa, Artificial Sequence
  epitope
  misc_feature (2)..(2): Xaa can be any naturally occurring amino acid
QXFPGQQQ

SEQ ID NO: 958 - protein, 8 aa, Artificial Sequence
  epitope
  misc_feature (2)..(3): Xaa can be any naturally occurring amino acid
  misc_feature (7)..(7): Xaa can be any naturally occurring amino acid
QXXPGQXQ

SEQ ID NO: 959 - protein, 8 aa, Artificial Sequence
  epitope
  misc_feature (2)..(3): Xaa can be any naturally occurring amino acid
  misc_feature (7)..(8): Xaa can be any naturally occurring amino acid
QXXPGQXX

SEQ ID NO: 960 - protein, 6 aa, Artificial Sequence
  epitope
LGQQQQ

SEQ ID NO: 961 - protein, 8 aa, Artificial Sequence
  epitope
QQQFPGQQ

SEQ ID NO: 962 - protein, 5 aa, Artificial Sequence
  epitope
FPGQQ

SEQ ID NO: 963 - protein, 15 aa, Artificial Sequence
  epitope
  misc_feature (1)..(2): Xaa can be any naturally occurring amino acid
  misc_feature (4)..(4): Xaa can be any naturally occurring amino acid
  misc_feature (8)..(15): Xaa can be any naturally occurring amino acid
XXQXQQQXXXXXXXX

SEQ ID NO: 964 - protein, 10 aa, Artificial Sequence
  epitope
QQQQFPGQQQ

SEQ ID NO: 965 - protein, 9 aa, Artificial Sequence
  epitope
QQQFPGQQQ

SEQ ID NO: 966 - protein, 7 aa, Artificial Sequence
  epitope
QQFPGQQ

SEQ ID NO: 967 - protein, 15 aa, Artificial Sequence
  epitope
  misc_feature (3)..(3): Xaa can be any naturally occurring amino acid
  misc_feature (11)..(15): Xaa can be any naturally occurring amino acid
LGXQQQQFPGXXXXX

SEQ ID NO: 968 - protein, 10 aa, Artificial Sequence
  epitope
QQQQFPGQQQ

SEQ ID NO: 969 - protein, 5 aa, Artificial Sequence
  epitope
QQQFP

SEQ ID NO: 970 - protein, 5 aa, Artificial Sequence
  epitope
  misc_feature (5)..(5): Xaa can be any naturally occurring amino acid
QQQFX

SEQ ID NO: 971 - protein, 15 aa, Artificial Sequence
  epitope
  misc_feature (1)..(1): Xaa can be any naturally occurring amino acid
  misc_feature (4)..(4): Xaa can be any naturally occurring amino acid
  misc_feature (9)..(15): Xaa can be any naturally occurring amino acid
XGQXQQQFXXXXXXX

SEQ ID NO: 972 - protein, 15 aa, Artificial Sequence
  epitope
  misc_feature (1)..(2): Xaa can be any naturally occurring amino acid
  misc_feature (4)..(4): Xaa can be any naturally occurring amino acid
  misc_feature (9)..(15): Xaa can be any naturally occurring amino acid
XXQXQQQFXXXXXXX

SEQ ID NO: 973 - protein, 4 aa, Artificial Sequence
  epitope
QQQQ

SEQ ID NO: 974 - protein, 15 aa, Artificial Sequence
  epitope
QPFPQQQQPIIILQQ

SEQ ID NO: 975 - protein, 9 aa, Artificial Sequence
  epitope
QPFPQQQQP

SEQ ID NO: 976 - protein, 5 aa, Artificial Sequence
  epitope
IIILQ

SEQ ID NO: 977 - protein, 7 aa, Artificial Sequence
  epitope
QPFPQQQ

SEQ ID NO: 978 - protein, 10 aa, Artificial Sequence
  epitope
FPQQQQPIII

SEQ ID NO: 979 - protein, 5 aa, Artificial Sequence
  epitope
IIILQ

SEQ ID NO: 980 - protein, 6 aa, Artificial Sequence
  epitope
QPFPQQ

SEQ ID NO: 981 - protein, 4 aa, Artificial Sequence
  epitope
PFPQ

SEQ ID NO: 982 - protein, 5 aa, Artificial Sequence
  epitope
IIILQ

SEQ ID NO: 983 - protein, 15 aa, Artificial Sequence
  epitope
  misc_feature (1)..(5): Xaa can be any naturally occurring amino acid
  misc_feature (7)..(7): Xaa can be any naturally occurring amino acid
  misc_feature (14)..(15): Xaa can be any naturally occurring amino acid
XXXXXQXQPIIILXX

SEQ ID NO: 984 - protein, 8 aa, Artificial Sequence
  epitope
QPFPQQQQ

SEQ ID NO: 985 - protein, 7 aa, Artificial Sequence
  epitope
QPFPQQQ

SEQ ID NO: 986 - protein, 5 aa, Artificial Sequence
  epitope
IIILQ

SEQ ID NO: 987 - protein, 5 aa, Artificial Sequence
  epitope
  misc_feature (5)..(5): Xaa can be any naturally occurring amino acid
IIILX

SEQ ID NO: 988 - protein, 6 aa, Artificial Sequence
  epitope
QPFPQQ

SEQ ID NO: 989 - protein, 5 aa, Artificial Sequence
  epitope
IIILQ

SEQ ID NO: 990 - protein, 15 aa, Artificial Sequence
  epitope
  misc_feature (2)..(4): Xaa can be any naturally occurring amino acid
  misc_feature (8)..(10): Xaa can be any naturally occurring amino acid
  misc_feature (12)..(12): Xaa can be any naturally occurring amino acid
  misc_feature (14)..(14): Xaa can be any naturally occurring amino acid
QXXXQQQXXXIXLXQ

SEQ ID NO: 991 - protein, 15 aa, Artificial Sequence
  epitope
  misc_feature (1)..(5): Xaa can be any naturally occurring amino acid
  misc_feature (7)..(9): Xaa can be any naturally occurring amino acid
  misc_feature (14)..(15): Xaa can be any naturally occurring amino acid
XXXXXQXXXIIILXX

SEQ ID NO: 992 - protein, 15 aa, Artificial Sequence
  epitope
  misc_feature (1)..(9): Xaa can be any naturally occurring amino acid
  misc_feature (14)..(15): Xaa can be any naturally occurring amino acid
XXXXXXXXXIIILXX

SEQ ID NO: 993 - protein, 10 aa, Artificial Sequence
  epitope
QQQQPIIILQ

SEQ ID NO: 994 - protein, 10 aa, Artificial Sequence
  epitope
  misc_feature (1)..(1): Xaa can be any naturally occurring amino acid
  misc_feature (3)..(5): Xaa can be any naturally occurring amino acid
  misc_feature (10)..(10): Xaa can be any naturally occurring amino acid
XQXXXIIILX

SEQ ID NO: 995 - protein, 10 aa, Artificial Sequence
  epitope
  misc_feature (1)..(5): Xaa can be any naturally occurring amino acid
  misc_feature (10)..(10): Xaa can be any naturally occurring amino acid
XXXXXIIILX

SEQ ID NO: 996 - protein, 7 aa, Artificial Sequence
  epitope
QPFPQQQ

SEQ ID NO: 997 - protein, 6 aa, Artificial Sequence
  epitope
PFPQQQ

SEQ ID NO: 998 - protein, 5 aa, Artificial Sequence
  epitope
IIILQ

SEQ ID NO: 999 - protein, 10 aa, Artificial Sequence
  epitope
QQQQPIIILQ

SEQ ID NO: 1000 - protein, 10 aa, Artificial Sequence
  epitope
QPFPQQQQPI

SEQ ID NO: 1001 - protein, 6 aa, Artificial Sequence
  epitope
PIIILQ

SEQ ID NO: 1002 - protein, 5 aa, Artificial Sequence
  epitope
IIILQ

SEQ ID NO: 1003 - protein, 6 aa, Artificial Sequence
  epitope
QPFPQQ

SEQ ID NO: 1004 - protein, 10 aa, Artificial Sequence
  epitope
QQQQPIIILQ

SEQ ID NO: 1005 - protein, 7 aa, Artificial Sequence
  epitope
QPFPQQQ

SEQ ID NO: 1006 - protein, 8 aa, Artificial Sequence
  epitope
IIILQQSP

SEQ ID NO: 1007 - protein, 15 aa, Artificial Sequence
  epitope
  misc_feature (2)..(2): Xaa can be any naturally occurring amino acid
  misc_feature (14)..(15): Xaa can be any naturally occurring amino acid
QXFPQQQQPIIILXX

SEQ ID NO: 1008 - protein, 15 aa, Artificial Sequence
  epitope
  misc_feature (1)..(3): Xaa can be any naturally occurring amino acid
  misc_feature (9)..(9): Xaa can be any naturally occurring amino acid
  misc_feature (14)..(15): Xaa can be any naturally occurring amino acid
XXXPQQQQXIIILXX

SEQ ID NO: 1009 - protein, 15 aa, Artificial Sequence
  epitope
  misc_feature (1)..(5): Xaa can be any naturally occurring amino acid
  misc_feature (7)..(9): Xaa can be any naturally occurring amino acid
  misc_feature (14)..(15): Xaa can be any naturally occurring amino acid
XXXXXQXXXIIILXX

SEQ ID NO: 1010 - protein, 15 aa, Artificial Sequence
  epitope
WLQQQLVPQLQQPLS

SEQ ID NO: 1011 - protein, 15 aa, Artificial Sequence
  epitope
  misc_feature (2)..(2): Xaa can be any naturally occurring amino acid
  misc_feature (7)..(7): Xaa can be any naturally occurring amino acid
  misc_feature (12)..(12): Xaa can be any naturally occurring amino acid
  misc_feature (14)..(15): Xaa can be any naturally occurring amino acid
WXQQQLXPQLQXPXX

SEQ ID NO: 1012 - protein, 15 aa, Artificial Sequence
  epitope
  misc_feature (1)..(3): Xaa can be any naturally occurring amino acid
  misc_feature (7)..(7): Xaa can be any naturally occurring amino acid
  misc_feature (12)..(15): Xaa can be any naturally occurring amino acid
XXXQQLXPQLQXXXX

SEQ ID NO: 1013 - protein, 15 aa, Artificial Sequence
  epitope
  misc_feature (1)..(3): Xaa can be any naturally occurring amino acid
  misc_feature (7)..(7): Xaa can be any naturally occurring amino acid
  misc_feature (11)..(15): Xaa can be any naturally occurring amino acid
XXXQQLXPQLXXXXX

SEQ ID NO: 1014 - protein, 10 aa, Artificial Sequence
  epitope
QLVPQLQQPL

SEQ ID NO: 1015 - protein, 10 aa, Artificial Sequence
  epitope
  misc_feature (3)..(3): Xaa can be any naturally occurring amino acid
  misc_feature (8)..(8): Xaa can be any naturally occurring amino acid
  misc_feature (10)..(10): Xaa can be any naturally occurring amino acid
QLXPQLQXPX

SEQ ID NO: 1016 - protein, 10 aa, Artificial Sequence
  epitope
  misc_feature (3)..(3): Xaa can be any naturally occurring amino acid
  misc_feature (8)..(10): Xaa can be any naturally occurring amino acid
QLXPQLQXXX

SEQ ID NO: 1017 - protein, 10 aa, Artificial Sequence
  epitope
  misc_feature (3)..(3): Xaa can be any naturally occurring amino acid
  misc_feature (7)..(10): Xaa can be any naturally occurring amino acid
QLXPQLXXXX

SEQ ID NO: 1018 - protein, 15 aa, Artificial Sequence
  epitope
  misc_feature (12)..(12): Xaa can be any naturally occurring amino acid
WLQQQLVPQLQXPLS

SEQ ID NO: 1019 - protein, 15 aa, Artificial Sequence
  epitope
  misc_feature (1)..(1): Xaa can be any naturally occurring amino acid
  misc_feature (12)..(12): Xaa can be any naturally occurring amino acid
  misc_feature (14)..(14): Xaa can be any naturally occurring amino acid
XLQQQLVPQLQXPXS

SEQ ID NO: 1020 - protein, 10 aa, Artificial Sequence
  epitope
  misc_feature (8)..(8): Xaa can be any naturally occurring amino acid
QLVPQLQXPL

SEQ ID NO: 1021 - protein, 10 aa, Artificial Sequence
  epitope
  misc_feature (8)..(8): Xaa can be any naturally occurring amino acid
  misc_feature (10)..(10): Xaa can be any naturally occurring amino acid
QLVPQLQXPX

SEQ ID NO: 1022 - protein, 15 aa, Artificial Sequence
  epitope
  misc_feature (1)..(4): Xaa can be any naturally occurring amino acid
  misc_feature (6)..(7): Xaa can be any naturally occurring amino acid
  misc_feature (12)..(14): Xaa can be any naturally occurring amino acid
XXXXQXXPQLQXXXS

SEQ ID NO: 1023 - protein, 15 aa, Artificial Sequence
  epitope
  misc_feature (1)..(4): Xaa can be any naturally occurring amino acid
  misc_feature (6)..(7): Xaa can be any naturally occurring amino acid
  misc_feature (12)..(15): Xaa can be any naturally occurring amino acid
XXXXQXXPQLQXXXX

SEQ ID NO: 1024 - protein, 15 aa, Artificial Sequence
  epitope
  misc_feature (1)..(4): Xaa can be any naturally occurring amino acid
  misc_feature (6)..(7): Xaa can be any naturally occurring amino acid
  misc_feature (9)..(9): Xaa can be any naturally occurring amino acid
  misc_feature (12)..(15): Xaa can be any naturally occurring amino acid
XXXXQXXPXLQXXXX

SEQ ID NO: 1025 - protein, 8 aa, Artificial Sequence
  epitope
QLVPQLQQ

SEQ ID NO: 1026 - protein, 7 aa, Artificial Sequence
  epitope
QLVPQLQ

SEQ ID NO: 1027 - protein, 6 aa, Artificial Sequence
  epitope
LVPQLQ

SEQ ID NO: 1028 - protein, 6 aa, Artificial Sequence
  epitope
  misc_feature (1)..(2): Xaa can be any naturally occurring amino acid
XXPQLQ

SEQ ID NO: 1029 - protein, 15 aa, Artificial Sequence
  epitope
  misc_feature (1)..(4): Xaa can be any naturally occurring amino acid
  misc_feature (6)..(7): Xaa can be any naturally occurring amino acid
  misc_feature (9)..(9): Xaa can be any naturally occurring amino acid
  misc_feature (12)..(12): Xaa can be any naturally occurring amino acid
XXXXQXXPXLQXPLS

SEQ ID NO: 1030 - protein, 15 aa, Artificial Sequence
  epitope
  misc_feature (1)..(4): Xaa can be any naturally occurring amino acid
  misc_feature (6)..(7): Xaa can be any naturally occurring amino acid
  misc_feature (9)..(9): Xaa can be any naturally occurring amino acid
  misc_feature (11)..(12): Xaa can be any naturally occurring amino acid
  misc_feature (15)..(15): Xaa can be any naturally occurring amino acid
XXXXQXXPXLXXPLX

SEQ ID NO: 1031 - protein, 15 aa, Artificial Sequence
  epitope
  misc_feature (1)..(7): Xaa can be any naturally occurring amino acid
  misc_feature (9)..(9): Xaa can be any naturally occurring amino acid
  misc_feature (11)..(12): Xaa can be any naturally occurring amino acid
  misc_feature (15)..(15): Xaa can be any naturally occurring amino acid
XXXXXXXPXLXXPLX

SEQ ID NO: 1032 - protein, 8 aa, Artificial Sequence
  epitope
QLVPQLQQ

SEQ ID NO: 1033 - protein, 8 aa, Artificial Sequence
  epitope
  misc_feature (2)..(3): Xaa can be any naturally occurring amino acid
  misc_feature (5)..(5): Xaa can be any naturally occurring amino acid
  misc_feature (8)..(8): Xaa can be any naturally occurring amino acid
QXXPXLQX

SEQ ID NO: 1034 - protein, 15 aa, Artificial Sequence
  epitope
  misc_feature (1)..(4): Xaa can be any naturally occurring amino acid
  misc_feature (6)..(6): Xaa can be any naturally occurring amino acid
  misc_feature (12)..(12): Xaa can be any naturally occurring amino acid
  misc_feature (14)..(14): Xaa can be any naturally occurring amino acid
XXXXQXVPQLQXPXS

SEQ ID NO: 1035 - protein, 15 aa, Artificial Sequence
  epitope
  misc_feature (1)..(4): Xaa can be any naturally occurring amino acid
  misc_feature (6)..(6): Xaa can be any naturally occurring amino acid
  misc_feature (12)..(15): Xaa can be any naturally occurring amino acid
XXXXQXVPQLQXXXX

SEQ ID NO: 1036 - protein, 15 aa, Artificial Sequence
  epitope
  misc_feature (1)..(4): Xaa can be any naturally occurring amino acid
  misc_feature (6)..(7): Xaa can be any naturally occurring amino acid
  misc_feature (9)..(9): Xaa can be any naturally occurring amino acid
  misc_feature (12)..(15): Xaa can be any naturally occurring amino acid
XXXXQXXPXLQXXXX

SEQ ID NO: 1037 - protein, 7 aa, Artificial Sequence
  epitope
QLVPQLQ

SEQ ID NO: 1038 - protein, 7 aa, Artificial Sequence
  epitope
  misc_feature (2)..(2): Xaa can be any naturally occurring amino acid
QXVPQLQ

SEQ ID NO: 1039 - protein, 7 aa, Artificial Sequence
  epitope
  misc_feature (2)..(3): Xaa can be any naturally occurring amino acid
  misc_feature (5)..(5): Xaa can be any naturally occurring amino acid
QXXPXLQ

SEQ ID NO: 1040 - protein, 15 aa, Artificial Sequence
  epitope
  misc_feature (1)..(2): Xaa can be any naturally occurring amino acid
  misc_feature (6)..(6): Xaa can be any naturally occurring amino acid
  misc_feature (8)..(9): Xaa can be any naturally occurring amino acid
XXQQQXVXXLQQPLS

SEQ ID NO: 1041 - protein, 15 aa, Artificial Sequence
  epitope
  misc_feature (1)..(6): Xaa can be any naturally occurring amino acid
  misc_feature (8)..(9): Xaa can be any naturally occurring amino acid
  misc_feature (12)..(13): Xaa can be any naturally occurring amino acid
XXXXXXVXXLQXXLS

SEQ ID NO: 1042 - protein, 9 aa, Artificial Sequence
  epitope
LVPQLQQPL

SEQ ID NO: 1043 - protein, 8 aa, Artificial Sequence
  epitope
VPQLQQPL

SEQ ID NO: 1044 - protein, 8 aa, Artificial Sequence
  epitope
  misc_feature (2)..(3): Xaa can be any naturally occurring amino acid
VXXLQQPL

SEQ ID NO: 1045 - protein, 8 aa, Artificial Sequence
  epitope
  misc_feature (2)..(3): Xaa can be any naturally occurring amino acid
  misc_feature (6)..(7): Xaa can be any naturally occurring amino acid
VXXLQXXL

SEQ ID NO: 1046 - protein, 5 aa, Artificial Sequence
  epitope
LQQPL

SEQ ID NO: 1047 - protein, 15 aa, Artificial Sequence
  epitope
  misc_feature (1)..(3): Xaa can be any naturally occurring amino acid
  misc_feature (6)..(8): Xaa can be any naturally occurring amino acid
  misc_feature (13)..(13): Xaa can be any naturally occurring amino acid
XXXQQXXXQLQQXLS

SEQ ID NO: 1048 - protein, 15 aa, Artificial Sequence
  epitope
  misc_feature (1)..(8): Xaa can be any naturally occurring amino acid
  misc_feature (13)..(13): Xaa can be any naturally occurring amino acid
XXXXXXXXQLQQXLS

SEQ ID NO: 1049 - protein, 9 aa, Artificial Sequence
  epitope
LVPQLQQPL

SEQ ID NO: 1050 - protein, 5 aa, Artificial Sequence
  epitope
LQQPL

SEQ ID NO: 1051 - protein, 5 aa, Artificial Sequence
  epitope
  misc_feature (4)..(4): Xaa can be any naturally occurring amino acid
LQQXL

SEQ ID NO: 1052 - protein, 15 aa, Artificial Sequence
  epitope
  misc_feature (4)..(4): Xaa can be any naturally occurring amino acid
  misc_feature (6)..(9): Xaa can be any naturally occurring amino acid
  misc_feature (11)..(12): Xaa can be any naturally occurring amino acid
WLQXQXXXXLXXPLS

SEQ ID NO: 1053 - protein, 15 aa, Artificial Sequence
  epitope
  misc_feature (3)..(4): Xaa can be any naturally occurring amino acid
  misc_feature (6)..(9): Xaa can be any naturally occurring amino acid
  misc_feature (11)..(12): Xaa can be any naturally occurring amino acid
WLXXQXXXXLXXPLS

SEQ ID NO: 1054 - protein, 15 aa, Artificial Sequence
  epitope
  misc_feature (3)..(4): Xaa can be any naturally occurring amino acid
  misc_feature (6)..(13): Xaa can be any naturally occurring amino acid
WLXXQXXXXXXXXLS

SEQ ID NO: 1055 - protein, 9 aa, Artificial Sequence
  epitope
LVPQLQQPL

SEQ ID NO: 1056 - protein, 8 aa, Artificial Sequence
  epitope
VPQLQQPL

SEQ ID NO: 1057 - protein, 15 aa, Artificial Sequence
  epitope
  misc_feature (1)..(1): Xaa can be any naturally occurring amino acid
  misc_feature (3)..(3): Xaa can be any naturally occurring amino acid
  misc_feature (6)..(6): Xaa can be any naturally occurring amino acid
  misc_feature (9)..(12): Xaa can be any naturally occurring amino acid
XLXQQXVPXXXXPLS

SEQ ID NO: 1058 - protein, 15 aa, Artificial Sequence
  epitope
  misc_feature (1)..(1): Xaa can be any naturally occurring amino acid
  misc_feature (3)..(4): Xaa can be any naturally occurring amino acid
  misc_feature (6)..(6): Xaa can be any naturally occurring amino acid
  misc_feature (9)..(12): Xaa can be any naturally occurring amino acid
  misc_feature (14)..(14): Xaa can be any naturally occurring amino acid
XLXXQXVPXXXXPXS

SEQ ID NO: 1059 - protein, 15 aa, Artificial Sequence
  epitope
  misc_feature (1)..(4): Xaa can be any naturally occurring amino acid
  misc_feature (6)..(6): Xaa can be any naturally occurring amino acid
  misc_feature (9)..(12): Xaa can be any naturally occurring amino acid
  misc_feature (14)..(14): Xaa can be any naturally occurring amino acid
XXXXQXVPXXXXPXS

SEQ ID NO: 1060 - protein, 8 aa, Artificial Sequence
  epitope
LQQQLVPQ

SEQ ID NO: 1061 - protein, 8 aa, Artificial Sequence
  epitope
  misc_feature (2)..(2): Xaa can be any naturally occurring amino acid
  misc_feature (5)..(5): Xaa can be any naturally occurring amino acid
  misc_feature (8)..(8): Xaa can be any naturally occurring amino acid
LXQQXVPX

SEQ ID NO: 1062 - protein, 8 aa, Artificial Sequence
  epitope
  misc_feature (2)..(3): Xaa can be any naturally occurring amino acid
  misc_feature (5)..(5): Xaa can be any naturally occurring amino acid
  misc_feature (8)..(8): Xaa can be any naturally occurring amino acid
LXXQXVPX

SEQ ID NO: 1063 - protein, 5 aa, Artificial Sequence
  epitope
LQQPL

SEQ ID NO: 1064 - protein, 8 aa, Artificial Sequence
  epitope
QLVPQLQQ

SEQ ID NO: 1065 - protein, 7 aa, Artificial Sequence
  epitope
QLVPQLQ

SEQ ID NO: 1066 - protein, 7 aa, Artificial Sequence
  epitope
  misc_feature (1)..(3): Xaa can be any naturally occurring amino acid
XXXPQLQ

SEQ ID NO: 1067 - protein, 15 aa, Artificial Sequence
  epitope
  misc_feature (1)..(3): Xaa can be any naturally occurring amino acid
  misc_feature (6)..(6): Xaa can be any naturally occurring amino acid
  misc_feature (12)..(12): Xaa can be any naturally occurring amino acid
  misc_feature (14)..(14): Xaa can be any naturally occurring amino acid
XXXQQXVPQLQXPXS

SEQ ID NO: 1068 - protein, 8 aa, Artificial Sequence
  epitope
QLVPQLQQ

SEQ ID NO: 1069 - protein, 7 aa, Artificial Sequence
  epitope
QLVPQLQ

SEQ ID NO: 1070 - protein, 7 aa, Artificial Sequence
  epitope
  misc_feature (2)..(2): Xaa can be any naturally occurring amino acid
QXVPQLQ

SEQ ID NO: 1071 - protein, 7 aa, Artificial Sequence
  epitope
  misc_feature (2)..(2): Xaa can be any naturally occurring amino acid
  misc_feature (5)..(5): Xaa can be any naturally occurring amino acid
QXVPXLQ

SEQ ID NO: 1072 - protein, 15 aa, Artificial Sequence
  epitope
  misc_feature (1)..(1): Xaa can be any naturally occurring amino acid
  misc_feature (3)..(4): Xaa can be any naturally occurring amino acid
  misc_feature (9)..(9): Xaa can be any naturally occurring amino acid
  misc_feature (12)..(12): Xaa can be any naturally occurring amino acid
  misc_feature (14)..(14): Xaa can be any naturally occurring amino acid
XLXXQLVPXLQXPXS

SEQ ID NO: 1073 - protein, 15 aa, Artificial Sequence
  epitope
  misc_feature (1)..(1): Xaa can be any naturally occurring amino acid
  misc_feature (3)..(4): Xaa can be any naturally occurring amino acid
  misc_feature (6)..(6): Xaa can be any naturally occurring amino acid
  misc_feature (9)..(9): Xaa can be any naturally occurring amino acid
  misc_feature (12)..(14): Xaa can be any naturally occurring amino acid
XLXXQXVPXLQXXXS

SEQ ID NO: 1074 - protein, 15 aa, Artificial Sequence
  epitope
  misc_feature (1)..(4): Xaa can be any naturally occurring amino acid
  misc_feature (6)..(6): Xaa can be any naturally occurring amino acid
  misc_feature (9)..(9): Xaa can be any naturally occurring amino acid
  misc_feature (12)..(15): Xaa can be any naturally occurring amino acid
XXXXQXVPXLQXXXX

SEQ ID NO: 1075 - protein, 10 aa, Artificial Sequence
  epitope
QLVPQLQQPL

SEQ ID NO: 1076 - protein, 9 aa, Artificial Sequence
  epitope
LVPQLQQPL

SEQ ID NO: 1077 - protein, 9 aa, Artificial Sequence
  epitope
  misc_feature (4)..(4): Xaa can be any naturally occurring amino acid
  misc_feature (7)..(7): Xaa can be any naturally occurring amino acid
  misc_feature (9)..(9): Xaa can be any naturally occurring amino acid
LVPXLQXPX

SEQ ID NO: 1078 - protein, 9 aa, Artificial Sequence
  epitope
  misc_feature (1)..(1): Xaa can be any naturally occurring amino acid
  misc_feature (4)..(4): Xaa can be any naturally occurring amino acid
  misc_feature (7)..(9): Xaa can be any naturally occurring amino acid
XVPXLQXXX

SEQ ID NO: 1079 - protein, 5 aa, Artificial Sequence
  epitope
LQQPL

SEQ ID NO: 1080 - protein, 7 aa, Artificial Sequence
  epitope
QLVPQLQ

SEQ ID NO: 1081 - protein, 7 aa, Artificial Sequence
  epitope
  misc_feature (2)..(2): Xaa can be any naturally occurring amino acid
QXVPQLQ

SEQ ID NO: 1082 - protein, 7 aa, Artificial Sequence
  epitope
  misc_feature (2)..(2): Xaa can be any naturally occurring amino acid
  misc_feature (5)..(5): Xaa can be any naturally occurring amino acid
QXVPXLQ

SEQ ID NO: 1083 - protein, 7 aa, Artificial Sequence
  epitope
  misc_feature (2)..(3): Xaa can be any naturally occurring amino acid
  misc_feature (5)..(5): Xaa can be any naturally occurring amino acid
QXXPXLQ

SEQ ID NO: 1084 - protein, 15 aa, Artificial Sequence
  epitope
  misc_feature (3)..(4): Xaa can be any naturally occurring amino acid
  misc_feature (6)..(9): Xaa can be any naturally occurring amino acid
  misc_feature (12)..(12): Xaa can be any naturally occurring amino acid
WLXXQXXXXLQXPLS

SEQ ID NO: 1085 - protein, 15 aa, Artificial Sequence
  epitope
  misc_feature (1)..(1): Xaa can be any naturally occurring amino acid
  misc_feature (3)..(4): Xaa can be any naturally occurring amino acid
  misc_feature (6)..(9): Xaa can be any naturally occurring amino acid
  misc_feature (11)..(12): Xaa can be any naturally occurring amino acid
XLXXQXXXXLXXPLS

SEQ ID NO: 1086 - protein, 15 aa, Artificial Sequence
  epitope
  misc_feature (1)..(9): Xaa can be any naturally occurring amino acid
  misc_feature (11)..(12): Xaa can be any naturally occurring amino acid
XXXXXXXXXLXXPLS

SEQ ID NO: 1087 - protein, 5 aa, Artificial Sequence
  epitope
LQQPL

SEQ ID NO: 1088 - protein, 5 aa, Artificial Sequence
  epitope
  misc_feature (3)..(3): Xaa can be any naturally occurring amino acid
LQXPL

SEQ ID NO: 1089 - protein, 15 aa, Artificial Sequence
  epitope
STKGGKPFVDILKAG

SEQ ID NO: 1090 - protein, 8 aa, Artificial Sequence
  epitope
STKGGKPF

SEQ ID NO: 1091 - protein, 6 aa, Artificial Sequence
  epitope
STKGGK

SEQ ID NO: 1092 - protein, 15 aa, Artificial Sequence
  epitope
  misc_feature (7)..(7): Xaa can be any naturally occurring amino acid
  misc_feature (10)..(11): Xaa can be any naturally occurring amino acid
  misc_feature (14)..(15): Xaa can be any naturally occurring amino acid
STKGGKXFVXXLKXX

SEQ ID NO: 1093 - protein, 15 aa, Artificial Sequence
  epitope
  misc_feature (1)..(2): Xaa can be any naturally occurring amino acid
  misc_feature (5)..(5): Xaa can be any naturally occurring amino acid
  misc_feature (7)..(7): Xaa can be any naturally occurring amino acid
  misc_feature (9)..(15): Xaa can be any naturally occurring amino acid
XXKGXKXFXXXXXXX

SEQ ID NO: 1094 - protein, 15 aa, Artificial Sequence
  epitope
  misc_feature (5)..(5): Xaa can be any naturally occurring amino acid
  misc_feature (7)..(15): Xaa can be any naturally occurring amino acid
STKGXKXXXXXXXXX

SEQ ID NO: 1095 - protein, 15 aa, Artificial Sequence
  epitope
  misc_feature (1)..(2): Xaa can be any naturally occurring amino acid
  misc_feature (15)..(15): Xaa can be any naturally occurring amino acid
XXKGGKPFVDILKAX

SEQ ID NO: 1096 - protein, 15 aa, Artificial Sequence
  epitope
  misc_feature (1)..(4): Xaa can be any naturally occurring amino acid
  misc_feature (7)..(7): Xaa can be any naturally occurring amino acid
  misc_feature (11)..(11): Xaa can be any naturally occurring amino acid
  misc_feature (14)..(15): Xaa can be any naturally occurring amino acid
XXXXGKXFVDXLKXX

SEQ ID NO: 1097 - protein, 15 aa, Artificial Sequence
  epitope
  misc_feature (1)..(1): Xaa can be any naturally occurring amino acid
  misc_feature (5)..(5): Xaa can be any naturally occurring amino acid
  misc_feature (9)..(11): Xaa can be any naturally occurring amino acid
  misc_feature (15)..(15): Xaa can be any naturally occurring amino acid
XTKGXKPFXXXLKAX

SEQ ID NO: 1098 - protein, 15 aa, Artificial Sequence
  epitope
  misc_feature (1)..(1): Xaa can be any naturally occurring amino acid
  misc_feature (5)..(5): Xaa can be any naturally occurring amino acid
  misc_feature (9)..(11): Xaa can be any naturally occurring amino acid
  misc_feature (13)..(15): Xaa can be any naturally occurring amino acid
XTKGXKPFXXXLXXX

SEQ ID NO: 1099 - protein, 15 aa, Artificial Sequence
  epitope
  misc_feature (1)..(2): Xaa can be any naturally occurring amino acid
  misc_feature (4)..(5): Xaa can be any naturally occurring amino acid
  misc_feature (8)..(11): Xaa can be any naturally occurring amino acid
  misc_feature (13)..(15): Xaa can be any naturally occurring amino acid
XXKXXKPXXXXLXXX

SEQ ID NO: 1100 - protein, 15 aa, Artificial Sequence
  epitope
  misc_feature (7)..(9): Xaa can be any naturally occurring amino acid
  misc_feature (11)..(11): Xaa can be any naturally occurring amino acid
  misc_feature (13)..(14): Xaa can be any naturally occurring amino acid
STKGGKXXXDXLXXG

SEQ ID NO: 1101 - protein, 4 aa, Artificial Sequence
  epitope
KGGK

SEQ ID NO: 1102 - protein, 9 aa, Artificial Sequence
  epitope
KPFVDILKA

SEQ ID NO: 1103 - protein, 15 aa, Artificial Sequence
  epitope
  misc_feature (1)..(1): Xaa can be any naturally occurring amino acid
  misc_feature (7)..(7): Xaa can be any naturally occurring amino acid
  misc_feature (10)..(11): Xaa can be any naturally occurring amino acid
  misc_feature (14)..(15): Xaa can be any naturally occurring amino acid
XTKGGKXFVXXLKXX

SEQ ID NO: 1104 - protein, 15 aa, Artificial Sequence
  epitope
  misc_feature (1)..(2): Xaa can be any naturally occurring amino acid
  misc_feature (7)..(7): Xaa can be any naturally occurring amino acid
  misc_feature (9)..(12): Xaa can be any naturally occurring amino acid
  misc_feature (14)..(15): Xaa can be any naturally occurring amino acid
XXKGGKXFXXXXKXX

SEQ ID NO: 1105 - protein, 15 aa, Artificial Sequence
  epitope
  misc_feature (1)..(2): Xaa can be any naturally occurring amino acid
  misc_feature (7)..(7): Xaa can be any naturally occurring amino acid
  misc_feature (9)..(12): Xaa can be any naturally occurring amino acid
  misc_feature (14)..(15): Xaa can be any naturally occurring amino acid
XXKGGKXFXXXXKXX

SEQ ID NO: 1106 - protein, 15 aa, Artificial Sequence
  epitope
  misc_feature (2)..(2): Xaa can be any naturally occurring amino acid
  misc_feature (5)..(6): Xaa can be any naturally occurring amino acid
SXKGXXPFVDILKAG

SEQ ID NO: 1107 - protein, 15 aa, Artificial Sequence
  epitope
  misc_feature (1)..(2): Xaa can be any naturally occurring amino acid
  misc_feature (4)..(6): Xaa can be any naturally occurring amino acid
XXKXXXPFVDILKAG

SEQ ID NO: 1108 - protein, 4 aa, Artificial Sequence
  epitope
KGGK

SEQ ID NO: 1109 - protein, 15 aa, Artificial Sequence
  epitope
  misc_feature (6)..(10): Xaa can be any naturally occurring amino acid
STKGGXXXXXILKAG

SEQ ID NO: 1110 - protein, 15 aa, Artificial Sequence
  epitope
  misc_feature (1)..(1): Xaa can be any naturally occurring amino acid
  misc_feature (5)..(11): Xaa can be any naturally occurring amino acid
XTKGXXXXXXXLKAG

SEQ ID NO: 1111 - protein, 15 aa, Artificial Sequence
  epitope
  misc_feature (1)..(1): Xaa can be any naturally occurring amino acid
  misc_feature (5)..(12): Xaa can be any naturally occurring amino acid
  misc_feature (14)..(15): Xaa can be any naturally occurring amino acid
XTKGXXXXXXXXKXX

SEQ ID NO: 1112 - protein, 6 aa, Artificial Sequence
  epitope
STKGGK

SEQ ID NO: 1113 - protein, 10 aa, Artificial Sequence
  epitope
KGGKPFVDIL

SEQ ID NO: 1114 - protein, 10 aa, Artificial Sequence
  epitope
  misc_feature (4)..(8): Xaa can be any naturally occurring amino acid
KGGXXXXXIL

SEQ ID NO: 1115 - protein, 10 aa, Artificial Sequence
  epitope
  misc_feature (4)..(9): Xaa can be any naturally occurring amino acid
KGGXXXXXXL

SEQ ID NO: 1116 - protein, 15 aa, Artificial Sequence
  epitope
  misc_feature (5)..(5): Xaa can be any naturally occurring amino acid
  misc_feature (12)..(12): Xaa can be any naturally occurring amino acid
STKGXKPFVDIXKAG

SEQ ID NO: 1117 - protein, 15 aa, Artificial Sequence
  epitope
  misc_feature (5)..(5): Xaa can be any naturally occurring amino acid
  misc_feature (12)..(12): Xaa can be any naturally occurring amino acid
  misc_feature (15)..(15): Xaa can be any naturally occurring amino acid
STKGXKPFVDIXKAX

SEQ ID NO: 1118 - protein, 15 aa, Artificial Sequence
  epitope
  misc_feature (5)..(5): Xaa can be any naturally occurring amino acid
  misc_feature (11)..(12): Xaa can be any naturally occurring amino acid
  misc_feature (15)..(15): Xaa can be any naturally occurring amino acid
STKGXKPFVDXXKAX

SEQ ID NO: 1119 - protein, 5 aa, Artificial Sequence
  epitope
TKGGK

SEQ ID NO: 1120 - protein, 5 aa, Artificial Sequence
  epitope
  misc_feature (4)..(4): Xaa can be any naturally occurring amino acid
TKGXK

SEQ ID NO: 1121 - protein, 10 aa, Artificial Sequence
  epitope
GGKPFVDILK

SEQ ID NO: 1122 - protein, 9 aa, Artificial Sequence
  epitope
GKPFVDILK

SEQ ID NO: 1123 - protein, 9 aa, Artificial Sequence
  epitope
  misc_feature (1)..(1): Xaa can be any naturally occurring amino acid
  misc_feature (8)..(8): Xaa can be any naturally occurring amino acid
XKPFVDIXK

SEQ ID NO: 1124 - protein, 9 aa, Artificial Sequence
  epitope
  misc_feature (1)..(1): Xaa can be any naturally occurring amino acid
  misc_feature (7)..(8): Xaa can be any naturally occurring amino acid
XKPFVDXXK

SEQ ID NO: 1125 - protein, 15 aa, Artificial Sequence
  epitope
  misc_feature (4)..(7): Xaa can be any naturally occurring amino acid
  misc_feature (9)..(15): Xaa can be any naturally occurring amino acid
STKXXXXFXXXXXXX

SEQ ID NO: 1126 - protein, 5 aa, Artificial Sequence
  epitope
TKGGK

SEQ ID NO: 1127 - protein, 15 aa, Artificial Sequence
  epitope
  misc_feature (1)..(1): Xaa can be any naturally occurring amino acid
  misc_feature (14)..(15): Xaa can be any naturally occurring amino acid
XTKGGKPFVDILKXX

SEQ ID NO: 1128 - protein, 15 aa, Artificial Sequence
  epitope
  misc_feature (1)..(2): Xaa can be any naturally occurring amino acid
  misc_feature (10)..(10): Xaa can be any naturally occurring amino acid
  misc_feature (15)..(15): Xaa can be any naturally occurring amino acid
XXKGGKPFVXILKAX

SEQ ID NO: 1129 - protein, 15 aa, Artificial Sequence
  epitope
  misc_feature (1)..(2): Xaa can be any naturally occurring amino acid
  misc_feature (4)..(5): Xaa can be any naturally occurring amino acid
  misc_feature (7)..(7): Xaa can be any naturally occurring amino acid
  misc_feature (9)..(11): Xaa can be any naturally occurring amino acid
  misc_feature (15)..(15): Xaa can be any naturally occurring amino acid
XXKXXKXFXXXLKAX

SEQ ID NO: 1130 - protein, 15 aa, Artificial Sequence
  epitope
  misc_feature (1)..(5): Xaa can be any naturally occurring amino acid
  misc_feature (7)..(7): Xaa can be any naturally occurring amino acid
  misc_feature (9)..(11): Xaa can be any naturally occurring amino acid
  misc_feature (15)..(15): Xaa can be any naturally occurring amino acid
XXXXXKXFXXXLKAX

SEQ ID NO: 1131 - protein, 6 aa, Artificial Sequence
  epitope
KPFVDI

SEQ ID NO: 1132 - protein, 6 aa, Artificial Sequence
  epitope
  misc_feature (5)..(5): Xaa can be any naturally occurring amino acid
KPFVXI

SEQ ID NO: 1133 - protein, 15 aa, Artificial Sequence
  epitope
  misc_feature (1)..(2): Xaa can be any naturally occurring amino acid
  misc_feature (5)..(5): Xaa can be any naturally occurring amino acid
  misc_feature (7)..(7): Xaa can be any naturally occurring amino acid
  misc_feature (11)..(11): Xaa can be any naturally occurring amino acid
  misc_feature (13)..(14): Xaa can be any naturally occurring amino acid
XXKGXKXFVDXLXXG

SEQ ID NO: 1134 - protein, 7 aa, Artificial Sequence
  epitope
STKGGKP

SEQ ID NO: 1135 - protein, 10 aa, Artificial Sequence
  epitope
KGGKPFVDIL

SEQ ID NO: 1136 - protein, 10 aa, Artificial Sequence
  epitope
GKPFVDILKA

SEQ ID NO: 1137 - protein, 15 aa, Artificial Sequence
  epitope
  misc_feature (1)..(4): Xaa can be any naturally occurring amino acid
  misc_feature (6)..(7): Xaa can be any naturally occurring amino acid
  misc_feature (9)..(9): Xaa can be any naturally occurring amino acid
  misc_feature (11)..(11): Xaa can be any naturally occurring amino acid
  misc_feature (13)..(15): Xaa can be any naturally occurring amino acid
XXXXGXXFXDXLXXX

SEQ ID NO: 1138 - protein, 15 aa, Artificial Sequence
  epitope
  misc_feature (6)..(8): Xaa can be any naturally occurring amino acid
  misc_feature (11)..(11): Xaa can be any naturally occurring amino acid
  misc_feature (13)..(15): Xaa can be any naturally occurring amino acid
STKGGXXXVDXLXXX

SEQ ID NO: 1139 - protein, 15 aa, Artificial Sequence
  epitope
  misc_feature (1)..(2): Xaa can be any naturally occurring amino acid
  misc_feature (6)..(8): Xaa can be any naturally occurring amino acid
  misc_feature (11)..(15): Xaa can be any naturally occurring amino acid
XXKGGXXXVDXXXXX

SEQ ID NO: 1140 - protein, 4 aa, Artificial Sequence
  epitope
KGGK

SEQ ID NO: 1141 - protein, 7 aa, Artificial Sequence
  epitope
GGKPFVD

SEQ ID NO: 1142 - protein, 15 aa, Artificial Sequence
  epitope
TEPSQLSIDQNAQGL

SEQ ID NO: 1143 - protein, 15 aa, Artificial Sequence
  epitope
  misc_feature (1)..(4): Xaa can be any naturally occurring amino acid
  misc_feature (7)..(7): Xaa can be any naturally occurring amino acid
  misc_feature (12)..(15): Xaa can be any naturally occurring amino acid
XXXXQLXIDQNXXXX

SEQ ID NO: 1144 - protein, 15 aa, Artificial Sequence
  epitope
  misc_feature (1)..(4): Xaa can be any naturally occurring amino acid
  misc_feature (6)..(8): Xaa can be any naturally occurring amino acid
  misc_feature (12)..(15): Xaa can be any naturally occurring amino acid
XXXXQXXXDQNXXXX

SEQ ID NO: 1145 - protein, 7 aa, Artificial Sequence
  epitope
QLSIDQN

SEQ ID NO: 1146 - protein, 7 aa, Artificial Sequence
  epitope
  misc_feature (3)..(3): Xaa can be any naturally occurring amino acid
QLXIDQN

SEQ ID NO: 1147 - protein, 7 aa, Artificial Sequence
  epitope
  misc_feature (2)..(4): Xaa can be any naturally occurring amino acid
QXXXDQN

SEQ ID NO: 1148 - protein, 15 aa, Artificial Sequence
  epitope
  misc_feature (3)..(5): Xaa can be any naturally occurring amino acid
  misc_feature (12)..(15): Xaa can be any naturally occurring amino acid
TEXXXLSIDQNXXXX

SEQ ID NO: 1149 - protein, 4 aa, Artificial Sequence
  epitope
PSQL

SEQ ID NO: 1150 - protein, 10 aa, Artificial Sequence
  epitope
TEPSQLSIDQ

SEQ ID NO: 1151 - protein, 9 aa, Artificial Sequence
  epitope
SQLSIDQNA

SEQ ID NO: 1152 - protein, 10 aa, Artificial Sequence
  epitope
LSIDQNAQGL

SEQ ID NO: 1153 - protein, 15 aa, Artificial Sequence
  epitope
  misc_feature (12)..(15): Xaa can be any naturally occurring amino acid
TEPSQLSIDQNXXXX

SEQ ID NO: 1154 - protein, 5 aa, Artificial Sequence
  epitope
QGLAR

SEQ ID NO: 1155 - protein, 15 aa, Artificial Sequence
  epitope
  misc_feature (4)..(4): Xaa can be any naturally occurring amino acid
  misc_feature (6)..(6): Xaa can be any naturally occurring amino acid
  misc_feature (11)..(15): Xaa can be any naturally occurring amino acid
TEPXQXSIDQXXXXX

SEQ ID NO: 1156 - protein, 10 aa, Artificial Sequence
  epitope
TEPSQLSIDQ

SEQ ID NO: 1157 - protein, 6 aa, Artificial Sequence
  epitope
TEPSQL

SEQ ID NO: 1158 - protein, 6 aa, Artificial Sequence
  epitope
  misc_feature (4)..(4): Xaa can be any naturally occurring amino acid
  misc_feature (6)..(6): Xaa can be any naturally occurring amino acid
TEPXQX

SEQ ID NO: 1159 - protein, 15 aa, Artificial Sequence
  epitope
  misc_feature (10)..(10): Xaa can be any naturally occurring amino acid
  misc_feature (13)..(13): Xaa can be any naturally occurring amino acid
TEPSQLSIDXNAXGL

SEQ ID NO: 1160 - protein, 15 aa, Artificial Sequence
  epitope
  misc_feature (8)..(8): Xaa can be any naturally occurring amino acid
  misc_feature (10)..(10): Xaa can be any naturally occurring amino acid
  misc_feature (13)..(13): Xaa can be any naturally occurring amino acid
TEPSQLSXDXNAXGL

SEQ ID NO: 1161 - protein, 15 aa, Artificial Sequence
  epitope
  misc_feature (2)..(2): Xaa can be any naturally occurring amino acid
  misc_feature (4)..(4): Xaa can be any naturally occurring amino acid
  misc_feature (8)..(8): Xaa can be any naturally occurring amino acid
  misc_feature (10)..(10): Xaa can be any naturally occurring amino acid
  misc_feature (13)..(14): Xaa can be any naturally occurring amino acid
TXPXQLSXDXNAXXL

SEQ ID NO: 1162 - protein, 8 aa, Artificial Sequence
  epitope
SIDQNAQG

SEQ ID NO: 1163 - protein, 8 aa, Artificial Sequence
  epitope
  misc_feature (4)..(4): Xaa can be any naturally occurring amino acid
  misc_feature (7)..(7): Xaa can be any naturally occurring amino acid
SIDXNAXG

SEQ ID NO: 1164 - protein, 8 aa, Artificial Sequence
  epitope
  misc_feature (2)..(2): Xaa can be any naturally occurring amino acid
  misc_feature (4)..(4): Xaa can be any naturally occurring amino acid
  misc_feature (7)..(7): Xaa can be any naturally occurring amino acid
SXDXNAXG

SEQ ID NO: 1165 - protein, 8 aa, Artificial Sequence
  epitope
  misc_feature (2)..(2): Xaa can be any naturally occurring amino acid
  misc_feature (4)..(4): Xaa can be any naturally occurring amino acid
  misc_feature (7)..(8): Xaa can be any naturally occurring amino acid
SXDXNAXX

SEQ ID NO: 1166 - protein, 15 aa, Artificial Sequence
  epitope
PGQQQQFPPQQPYPQ

SEQ ID NO: 1167 - protein, 15 aa, Artificial Sequence
  epitope
  misc_feature (2)..(2): Xaa can be any naturally occurring amino acid
  misc_feature (6)..(14): Xaa can be any naturally occurring amino acid
PXQQQXXXXXXXXXQ

SEQ ID NO: 1168 - protein, 10 aa, Artificial Sequence
  epitope
PGQQQQFPPQ

SEQ ID NO: 1169 - protein, 10 aa, Artificial Sequence
  epitope
  misc_feature (2)..(2): Xaa can be any naturally occurring amino acid
  misc_feature (6)..(10): Xaa can be any naturally occurring amino acid
PXQQQXXXXX

SEQ ID NO: 1170 - protein, 6 aa, Artificial Sequence
  epitope
FPPQQP

SEQ ID NO: 1171 - protein, 15 aa, Artificial Sequence
  epitope
  misc_feature (2)..(2): Xaa can be any naturally occurring amino acid
  misc_feature (4)..(4): Xaa can be any naturally occurring amino acid
  misc_feature (6)..(9): Xaa can be any naturally occurring amino acid
  misc_feature (12)..(12): Xaa can be any naturally occurring amino acid
  misc_feature (15)..(15): Xaa can be any naturally occurring amino acid
PXQXQXXXXQQXYPX

SEQ ID NO: 1172 - protein, 15 aa, Artificial Sequence
  epitope
  misc_feature (2)..(4): Xaa can be any naturally occurring amino acid
  misc_feature (6)..(10): Xaa can be any naturally occurring amino acid
  misc_feature (12)..(12): Xaa can be any naturally occurring amino acid
  misc_feature (14)..(15): Xaa can be any naturally occurring amino acid
PXXXQXXXXXQXYXX

SEQ ID NO: 1173 - protein, 10 aa, Artificial Sequence
  epitope
QQQQFPPQQP

SEQ ID NO: 1174 - protein, 10 aa, Artificial Sequence
  epitope
  misc_feature (2)..(2): Xaa can be any naturally occurring amino acid
  misc_feature (4)..(7): Xaa can be any naturally occurring amino acid
  misc_feature (10)..(10): Xaa can be any naturally occurring amino acid
QXQXXXXQQX

SEQ ID NO: 1175 - protein, 9 aa, Artificial Sequence
  epitope
QQQFPPQQP

SEQ ID NO: 1176 - protein, 7 aa, Artificial Sequence
  epitope
QQFPPQQ

SEQ ID NO: 1177 - protein, 6 aa, Artificial Sequence
  epitope
QQFPPQ

SEQ ID NO: 1178 - protein, 15 aa, Artificial Sequence
  epitope
  misc_feature (1)..(2): Xaa can be any naturally occurring amino acid
  misc_feature (6)..(7): Xaa can be any naturally occurring amino acid
  misc_feature (9)..(15): Xaa can be any naturally occurring amino acid
XXQQQXXPXXXXXXX

SEQ ID NO: 1179 - protein, 7 aa, Artificial Sequence
  epitope
QQFPPQQ

SEQ ID NO: 1180 - protein, 5 aa, Artificial Sequence
  epitope
QQFPP

SEQ ID NO: 1181 - protein, 15 aa, Artificial Sequence
  epitope
  misc_feature (6)..(9): Xaa can be any naturally occurring amino acid
  misc_feature (12)..(15): Xaa can be any naturally occurring amino acid
PGQQQXXXXQQXXXX

SEQ ID NO: 1182 - protein, 15 aa, Artificial Sequence
  epitope
  misc_feature (1)..(2): Xaa can be any naturally occurring amino acid
  misc_feature (6)..(10): Xaa can be any naturally occurring amino acid
  misc_feature (12)..(15): Xaa can be any naturally occurring amino acid
XXQQQXXXXXQXXXX

SEQ ID NO: 1183 - protein, 7 aa, Artificial Sequence
  epitope
QQFPPQQ

SEQ ID NO: 1184 - protein, 15 aa, Artificial Sequence
  epitope
  misc_feature (1)..(3): Xaa can be any naturally occurring amino acid
  misc_feature (6)..(10): Xaa can be any naturally occurring amino acid
  misc_feature (13)..(15): Xaa can be any naturally occurring amino acid
XXXQQXXXXXQPXXX

SEQ ID NO: 1185 - protein, 8 aa, Artificial Sequence
  epitope
QQFPPQQP

SEQ ID NO: 1186 - protein, 15 aa, Artificial Sequence
  epitope
  misc_feature (2)..(3): Xaa can be any naturally occurring amino acid
  misc_feature (7)..(10): Xaa can be any naturally occurring amino acid
  misc_feature (12)..(15): Xaa can be any naturally occurring amino acid
PXXQQQXXXXQXXXX

SEQ ID NO: 1187 - protein, 9 aa, Artificial Sequence
  epitope
QQQQFPPQQ

SEQ ID NO: 1188 - protein, 7 aa, Artificial Sequence
  epitope
QQFPPQQ

SEQ ID NO: 1189 - protein, 6 aa, Artificial Sequence
  epitope
QQFPPQ

SEQ ID NO: 1190 - protein, 10 aa, Artificial Sequence
  epitope
QQFPPQQPYP

SEQ ID NO: 1191 - protein, 15 aa, Artificial Sequence
  epitope
  misc_feature (3)..(3): Xaa can be any naturally occurring amino acid
  misc_feature (6)..(9): Xaa can be any naturally occurring amino acid
  misc_feature (11)..(11): Xaa can be any naturally occurring amino acid
  misc_feature (14)..(15): Xaa can be any naturally occurring amino acid
PGXQQXXXXQXPYXX

SEQ ID NO: 1192 - protein, 15 aa, Artificial Sequence
  epitope
  misc_feature (3)..(3): Xaa can be any naturally occurring amino acid
  misc_feature (6)..(9): Xaa can be any naturally occurring amino acid
  misc_feature (11)..(12): Xaa can be any naturally occurring amino acid
  misc_feature (14)..(15): Xaa can be any naturally occurring amino acid
PGXQQXXXXQXXYXX

SEQ ID NO: 1193 - protein, 15 aa, Artificial Sequence
  epitope
  misc_feature (3)..(3): Xaa can be any naturally occurring amino acid
  misc_feature (6)..(12): Xaa can be any naturally occurring amino acid
  misc_feature (14)..(15): Xaa can be any naturally occurring amino acid
PGXQQXXXXXXXYXX

SEQ ID NO: 1194 - protein, 8 aa, Artificial Sequence
  epitope
QQQQFPPQ

SEQ ID NO: 1195 - protein, 10 aa, Artificial Sequence
  epitope
QFPPQQPYPQ

SEQ ID NO: 1196 - protein, 15 aa, Artificial Sequence
  epitope
  misc_feature (6)..(15): Xaa can be any naturally occurring amino acid
PGQQQXXXXXXXXXX

SEQ ID NO: 1197 - protein, 15 aa, Artificial Sequence
  epitope
  misc_feature (2)..(2): Xaa can be any naturally occurring amino acid
  misc_feature (6)..(15): Xaa can be any naturally occurring amino acid
PXQQQXXXXXXXXXX

SEQ ID NO: 1198 - protein, 15 aa, Artificial Sequence
  epitope
  misc_feature (7)..(7): Xaa can be any naturally occurring amino acid
PGQQQQXPPQQPYPQ

SEQ ID NO: 1199 - protein, 15 aa, Artificial Sequence
  epitope
  misc_feature (7)..(8): Xaa can be any naturally occurring amino acid
PGQQQQXXPQQPYPQ

SEQ ID NO: 1200 - protein, 9 aa, Artificial Sequence
  epitope
QQFPGQQQQ

SEQ ID NO: 1201 - protein, 15 aa, Artificial Sequence
  epitope
  misc_feature (7)..(9): Xaa can be any naturally occurring amino acid
  misc_feature (11)..(15): Xaa can be any naturally occurring amino acid
PGQQQQXXXQXXXXX

SEQ ID NO: 1202 - protein, 15 aa, Artificial Sequence
  epitope
  misc_feature (4)..(4): Xaa can be any naturally occurring amino acid
  misc_feature (6)..(15): Xaa can be any naturally occurring amino acid
PGQXQXXXXXXXXXX

SEQ ID NO: 1203 - protein, 15 aa, Artificial Sequence
  epitope
  misc_feature (3)..(4): Xaa can be any naturally occurring amino acid
  misc_feature (6)..(7): Xaa can be any naturally occurring amino acid
  misc_feature (10)..(14): Xaa can be any naturally occurring amino acid
PGXXQXXPPXXXXXQ

SEQ ID NO: 1204 - protein, 15 aa, Artificial Sequence
  epitope
  misc_feature (1)..(1): Xaa can be any naturally occurring amino acid
  misc_feature (3)..(4): Xaa can be any naturally occurring amino acid
  misc_feature (6)..(7): Xaa can be any naturally occurring amino acid
  misc_feature (10)..(14): Xaa can be any naturally occurring amino acid
XGXXQXXPPXXXXXQ

SEQ ID NO: 1205 - protein, 10 aa, Artificial Sequence
  epitope
QQQQFPPQQP

SEQ ID NO: 1206 - protein, 8 aa, Artificial Sequence
  epitope
QQFPPQQP

SEQ ID NO: 1207 - protein, 5 aa, Artificial Sequence
  epitope
FPPQQ

SEQ ID NO: 1208 - protein, 7 aa, Artificial Sequence
  epitope
QQFPPQQ

SEQ ID NO: 1209 - protein, 15 aa, Artificial Sequence
  epitope
PIQQQPQPFPQQPPC

SEQ ID NO: 1210 - protein, 6 aa, Artificial Sequence
  epitope
PIQQQP

SEQ ID NO: 1211 - protein, 6 aa, Artificial Sequence
  epitope
  misc_feature (5)..(6): Xaa can be any naturally occurring amino acid
PIQQXX

SEQ ID NO: 1212 - protein, 15 aa, Artificial Sequence
  epitope
  misc_feature (1)..(5): Xaa can be any naturally occurring amino acid
  misc_feature (8)..(8): Xaa can be any naturally occurring amino acid
  misc_feature (13)..(13): Xaa can be any naturally occurring amino acid
  misc_feature (15)..(15): Xaa can be any naturally occurring amino acid
XXXXXPQXFPQQXPX

SEQ ID NO: 1213 - protein, 10 aa, Artificial Sequence
  epitope
PIQQQPQPFP

SEQ ID NO: 1214 - protein, 10 aa, Artificial Sequence
  epitope
  misc_feature (1)..(5): Xaa can be any naturally occurring amino acid
  misc_feature (8)..(8): Xaa can be any naturally occurring amino acid
XXXXXPQXFP

SEQ ID NO: 1215 - protein, 6 aa, Artificial Sequence
  epitope
PQQPPC

SEQ ID NO: 1216 - protein, 5 aa, Artificial Sequence
  epitope
PQQPP

SEQ ID NO: 1217 - protein, 5 aa, Artificial Sequence
  epitope
  misc_feature (4)..(4): Xaa can be any naturally occurring amino acid
PQQXP

SEQ ID NO: 1218 - protein, 6 aa, Artificial Sequence
  epitope
PIQQQP

SEQ ID NO: 1219 - protein, 6 aa, Artificial Sequence
  epitope
  misc_feature (5)..(6): Xaa can be any naturally occurring amino acid
PIQQXX

SEQ ID NO: 1220 - protein, 5 aa, Artificial Sequence
  epitope
IQQQP

SEQ ID NO: 1221 - protein, 9 aa, Artificial Sequence
  epitope
PIQQQPQPF

SEQ ID NO: 1222 - protein, 9 aa, Artificial Sequence
  epitope
  misc_feature (5)..(9): Xaa can be any naturally occurring amino acid
PIQQXXXXX

SEQ ID NO: 1223 - protein, 5 aa, Artificial Sequence
  epitope
IQQQP

SEQ ID NO: 1224 - protein, 10 aa, Artificial Sequence
  epitope
PIQQQPQPFP

SEQ ID NO: 1225 - protein, 8 aa, Artificial Sequence
  epitope
QQPIQQQP

SEQ ID NO: 1226 - protein, 6 aa, Artificial Sequence
  epitope
PIQQQP

SEQ ID NO: 1227 - protein, 6 aa, Artificial Sequence
  epitope
PQQPPC

SEQ ID NO: 1228 - protein, 10 aa, Artificial Sequence
  epitope
PIQQQPQPFP

SEQ ID NO: 1229 - protein, 6 aa, Artificial Sequence
  epitope
PIQQQP

SEQ ID NO: 1230 - protein, 6 aa, Artificial Sequence
  epitope
  misc_feature (5)..(6): Xaa can be any naturally occurring amino acid
PIQQXX

SEQ ID NO: 1231 - protein, 5 aa, Artificial Sequence
  epitope
PQQPP

SEQ ID NO: 1232 - protein, 15 aa, Artificial Sequence
  epitope
  misc_feature (1)..(1): Xaa can be any naturally occurring amino acid
  misc_feature (4)..(9): Xaa can be any naturally occurring amino acid
  misc_feature (13)..(15): Xaa can be any naturally occurring amino acid
XIQXXXXXXPQQXXX

SEQ ID NO: 1233 - protein, 15 aa, Artificial Sequence
  epitope
  misc_feature (1)..(1): Xaa can be any naturally occurring amino acid
  misc_feature (3)..(9): Xaa can be any naturally occurring amino acid
  misc_feature (13)..(15): Xaa can be any naturally occurring amino acid
XIXXXXXXXPQQXXX

SEQ ID NO: 1234 - protein, 5 aa, Artificial Sequence
  epitope
PQQPP

SEQ ID NO: 1235 - protein, 5 aa, Artificial Sequence
  epitope
PQQPP

SEQ ID NO: 1236 - protein, 5 aa, Artificial Sequence
  epitope
PQQPP

SEQ ID NO: 1237 - protein, 15 aa, Artificial Sequence
  epitope
  misc_feature (2)..(2): Xaa can be any naturally occurring amino acid
PXQQQPQPFPQQPPC

SEQ ID NO: 1238 - protein, 15 aa, Artificial Sequence
  epitope
  misc_feature (2)..(2): Xaa can be any naturally occurring amino acid
  misc_feature (12)..(12): Xaa can be any naturally occurring amino acid
PXQQQPQPFPQXPPC

SEQ ID NO: 1239 - protein, 9 aa, Artificial Sequence
  epitope
QQQPIQQQP

SEQ ID NO: 1240 - protein, 9 aa, Artificial Sequence
  epitope
  misc_feature (5)..(5): Xaa can be any naturally occurring amino acid
QQQPXQQQP

SEQ ID NO: 1241 - protein, 6 aa, Artificial Sequence
  epitope
PIQQQP

SEQ ID NO: 1242 - protein, 6 aa, Artificial Sequence
  epitope
PQQPPC

SEQ ID NO: 1243 - protein, 5 aa, Artificial Sequence
  epitope
PQQPP

SEQ ID NO: 1244 - protein, 6 aa, Artificial Sequence
  epitope
PIQQQP

SEQ ID NO: 1245 - protein, 6 aa, Artificial Sequence
  epitope
PQQPPC

SEQ ID NO: 1246 - protein, 5 aa, Artificial Sequence
  epitope
PQQPP

SEQ ID NO: 1247 - protein, 6 aa, Artificial Sequence
  epitope
PIQQQP

SEQ ID NO: 1248 - protein, 5 aa, Artificial Sequence
  epitope
PQQPP

SEQ ID NO: 1249 - protein, 8 aa, Artificial Sequence
  epitope
QQPIQQQP

SEQ ID NO: 1250 - protein, 5 aa, Artificial Sequence
  epitope
PQQPP

SEQ ID NO: 1251 - protein, 15 aa, Artificial Sequence
  epitope
  misc_feature (1)..(6): Xaa can be any naturally occurring amino acid
  misc_feature (11)..(15): Xaa can be any naturally occurring amino acid
XXXXXXQPFPXXXXX

SEQ ID NO: 1252 - protein, 5 aa, Artificial Sequence
  epitope
PQQPP

SEQ ID NO: 1253 - protein, 10 aa, Artificial Sequence
  epitope
PIQQQPQPFP

SEQ ID NO: 1254 - protein, 6 aa, Artificial Sequence
  epitope
PIQQQP

SEQ ID NO: 1255 - protein, 6 aa, Artificial Sequence
  epitope
PQQPPC

SEQ ID NO: 1256 - protein, 5 aa, Artificial Sequence
  epitope
PQQPP

SEQ ID NO: 1257 - protein, 15 aa, Artificial Sequence
  epitope
SSLVSMILPRSDCKV

SEQ ID NO: 1258 - protein, 15 aa, Artificial Sequence
  epitope
  misc_feature (1)..(6): Xaa can be any naturally occurring amino acid
  misc_feature (8)..(8): Xaa can be any naturally occurring amino acid
  misc_feature (10)..(10): Xaa can be any naturally occurring amino acid
XXXXXXIXPXSDCKV

SEQ ID NO: 1259 - protein, 4 aa, Artificial Sequence
  epitope
LPRS

SEQ ID NO: 1260 - protein, 15 aa, Artificial Sequence
  epitope
  misc_feature (1)..(3): Xaa can be any naturally occurring amino acid
XXXVSMILPRSDCKV

SEQ ID NO: 1261 - protein, 15 aa, Artificial Sequence
  epitope
  misc_feature (1)..(4): Xaa can be any naturally occurring amino acid
  misc_feature (13)..(13): Xaa can be any naturally occurring amino acid
XXXXSMILPRSDXKV

SEQ ID NO: 1262 - protein, 15 aa, Artificial Sequence
  epitope
  misc_feature (1)..(3): Xaa can be any naturally occurring amino acid
  misc_feature (9)..(9): Xaa can be any naturally occurring amino acid
XXXVSMILXRSDCKV

SEQ ID NO: 1263 - protein, 15 aa, Artificial Sequence
  epitope
  misc_feature (1)..(3): Xaa can be any naturally occurring amino acid
  misc_feature (6)..(6): Xaa can be any naturally occurring amino acid
  misc_feature (9)..(13): Xaa can be any naturally occurring amino acid
XXXVSXILXXXXXKV

SEQ ID NO: 1264 - protein, 15 aa, Artificial Sequence
  epitope
  misc_feature (1)..(2): Xaa can be any naturally occurring amino acid
XXLVSMILPRSDCKV

SEQ ID NO: 1265 - protein, 15 aa, Artificial Sequence
  epitope
  misc_feature (1)..(5): Xaa can be any naturally occurring amino acid
XXXXXMILPRSDCKV

SEQ ID NO: 1266 - protein, 15 aa, Artificial Sequence
  epitope
  misc_feature (1)..(6): Xaa can be any naturally occurring amino acid
  misc_feature (8)..(8): Xaa can be any naturally occurring amino acid
  misc_feature (13)..(13): Xaa can be any naturally occurring amino acid
XXXXXXIXPRSDXKV

SEQ ID NO: 1267 - protein, 15 aa, Artificial Sequence
  epitope
  misc_feature (1)..(2): Xaa can be any naturally occurring amino acid
XXLVSMILPRSDCKV

SEQ ID NO: 1268 - protein, 15 aa, Artificial Sequence
  epitope
  misc_feature (1)..(4): Xaa can be any naturally occurring amino acid
XXXXSMILPRSDCKV

SEQ ID NO: 1269 - protein, 4 aa, Artificial Sequence
  epitope
LPRS

SEQ ID NO: 1270 - protein, 15 aa, Artificial Sequence
  epitope
  misc_feature (1)..(3): Xaa can be any naturally occurring amino acid
XXXVSMILPRSDCKV

SEQ ID NO: 1271 - protein, 15 aa, Artificial Sequence
  epitope
  misc_feature (1)..(4): Xaa can be any naturally occurring amino acid
  misc_feature (6)..(6): Xaa can be any naturally occurring amino acid
  misc_feature (12)..(12): Xaa can be any naturally occurring amino acid
XXXXSXILPRSXCKV

SEQ ID NO: 1272 - protein, 15 aa, Artificial Sequence
  epitope
  misc_feature (1)..(2): Xaa can be any naturally occurring amino acid
XXLVSMILPRSDCKV

SEQ ID NO: 1273 - protein, 15 aa, Artificial Sequence
  epitope
  misc_feature (1)..(3): Xaa can be any naturally occurring amino acid
XXXVSMILPRSDCKV

SEQ ID NO: 1274 - protein, 15 aa, Artificial Sequence
  epitope
  misc_feature (1)..(4): Xaa can be any naturally occurring amino acid
XXXXSMILPRSDCKV

SEQ ID NO: 1275 - protein, 15 aa, Artificial Sequence
  epitope
  misc_feature (1)..(3): Xaa can be any naturally occurring amino acid
XXXVSMILPRSDCKV

SEQ ID NO: 1276 - protein, 15 aa, Artificial Sequence
  epitope
  misc_feature (1)..(4): Xaa can be any naturally occurring amino acid
  misc_feature (9)..(9): Xaa can be any naturally occurring amino acid
  misc_feature (11)..(11): Xaa can be any naturally occurring amino acid
XXXXSMILXRXDCKV

SEQ ID NO: 1277 - protein, 4 aa, Artificial Sequence
  epitope
LPRS

SEQ ID NO: 1278 - protein, 15 aa, Artificial Sequence
  epitope
  misc_feature (1)..(3): Xaa can be any naturally occurring amino acid
XXXVSMILPRSDCKV

SEQ ID NO: 1279 - protein, 15 aa, Artificial Sequence
  epitope
  misc_feature (1)..(4): Xaa can be any naturally occurring amino acid
XXXXSMILPRSDCKV

SEQ ID NO: 1280 - protein, 15 aa, Artificial Sequence
  epitope
  misc_feature (1)..(3): Xaa can be any naturally occurring amino acid
XXXVSMILPRSDCKV

SEQ ID NO: 1281 - protein, 15 aa, Artificial Sequence
  epitope
  misc_feature (1)..(4): Xaa can be any naturally occurring amino acid
  misc_feature (9)..(9): Xaa can be any naturally occurring amino acid
XXXXSMILXRSDCKV

SEQ ID NO: 1282 - protein, 4 aa, Artificial Sequence
  epitope
LPRS

SEQ ID NO: 1283 - protein, 15 aa, Artificial Sequence
  epitope
  misc_feature (1)..(2): Xaa can be any naturally occurring amino acid
  misc_feature (6)..(6): Xaa can be any naturally occurring amino acid
  misc_feature (9)..(10): Xaa can be any naturally occurring amino acid
XXLVSXILXXSDCKV

SEQ ID NO: 1284 - protein, 15 aa, Artificial Sequence
  epitope
  misc_feature (1)..(3): Xaa can be any naturally occurring amino acid
  misc_feature (6)..(6): Xaa can be any naturally occurring amino acid
  misc_feature (8)..(10): Xaa can be any naturally occurring amino acid
XXXVSXIXXXSDCKV

SEQ ID NO: 1285 - protein, 15 aa, Artificial Sequence
  epitope
  misc_feature (1)..(2): Xaa can be any naturally occurring amino acid
  misc_feature (4)..(5): Xaa can be any naturally occurring amino acid
  misc_feature (9)..(10): Xaa can be any naturally occurring amino acid
  misc_feature (13)..(15): Xaa can be any naturally occurring amino acid
XXLXXMILXXSDXXX

SEQ ID NO: 1286 - protein, 15 aa, Artificial Sequence
  epitope
  misc_feature (1)..(2): Xaa can be any naturally occurring amino acid
  misc_feature (4)..(5): Xaa can be any naturally occurring amino acid
  misc_feature (9)..(11): Xaa can be any naturally occurring amino acid
  misc_feature (13)..(15): Xaa can be any naturally occurring amino acid
XXLXXMILXXXDXXX

SEQ ID NO: 1287 - protein, 5 aa, Artificial Sequence
  epitope
ILPRS

SEQ ID NO: 1288 - protein, 4 aa, Artificial Sequence
  epitope
LPRS

SEQ ID NO: 1289 - protein, 15 aa, Artificial Sequence
  epitope
  misc_feature (1)..(3): Xaa can be any naturally occurring amino acid
  misc_feature (5)..(6): Xaa can be any naturally occurring amino acid
  misc_feature (9)..(9): Xaa can be any naturally occurring amino acid
  misc_feature (11)..(11): Xaa can be any naturally occurring amino acid
  misc_feature (13)..(13): Xaa can be any naturally occurring amino acid
XXXVXXILXRXDXKV

SEQ ID NO: 1290 - protein, 15 aa, Artificial Sequence
  epitope
  misc_feature (1)..(6): Xaa can be any naturally occurring amino acid
  misc_feature (9)..(9): Xaa can be any naturally occurring amino acid
  misc_feature (11)..(11): Xaa can be any naturally occurring amino acid
  misc_feature (13)..(15): Xaa can be any naturally occurring amino acid
XXXXXXILXRXDXXX

SEQ ID NO: 1291 - protein, 4 aa, Artificial Sequence
  epitope
LPRS

SEQ ID NO: 1292 - protein, 15 aa, Artificial Sequence
  epitope
  misc_feature (1)..(2): Xaa can be any naturally occurring amino acid
  misc_feature (9)..(10): Xaa can be any naturally occurring amino acid
XXLVSMILXXSDCKV

SEQ ID NO: 1293 - protein, 15 aa, Artificial Sequence
  epitope
  misc_feature (1)..(3): Xaa can be any naturally occurring amino acid
  misc_feature (9)..(10): Xaa can be any naturally occurring amino acid
XXXVSMILXXSDCKV

SEQ ID NO: 1294 - protein, 15 aa, Artificial Sequence
  epitope
  misc_feature (1)..(3): Xaa can be any naturally occurring amino acid
  misc_feature (6)..(6): Xaa can be any naturally occurring amino acid
  misc_feature (9)..(15): Xaa can be any naturally occurring amino acid
XXXVSXILXXXXXXX

SEQ ID NO: 1295 - protein, 9 aa, Artificial Sequence
  epitope
VSMILPRSD

SEQ ID NO: 1296 - protein, 9 aa, Artificial Sequence
  epitope
ILPRSDCKV

SEQ ID NO: 1297 - protein, 15 aa, Artificial Sequence
  epitope
SINVENVEDNRRALR

SEQ ID NO: 1298 - protein, 15 aa, Artificial Sequence
  epitope
  misc_feature (9)..(9): Xaa can be any naturally occurring amino acid
  misc_feature (14)..(14): Xaa can be any naturally occurring amino acid
SINVENVEXNRRAXR

SEQ ID NO: 1299 - protein, 15 aa, Artificial Sequence
  epitope
  misc_feature (9)..(9): Xaa can be any naturally occurring amino acid
  misc_feature (14)..(15): Xaa can be any naturally occurring amino acid
SINVENVEXNRRAXX

SEQ ID NO: 1300 - protein, 9 aa, Artificial Sequence
  epitope
SINVENVED

SEQ ID NO: 1301 - protein, 6 aa, Artificial Sequence
  epitope
SINVEN

SEQ ID NO: 1302 - protein, 15 aa, Artificial Sequence
  epitope
  misc_feature (1)..(4): Xaa can be any naturally occurring amino acid
  misc_feature (7)..(7): Xaa can be any naturally occurring amino acid
  misc_feature (10)..(10): Xaa can be any naturally occurring amino acid
  misc_feature (12)..(15): Xaa can be any naturally occurring amino acid
XXXXENXEDXRXXXX

SEQ ID NO: 1303 - protein, 5 aa, Artificial Sequence
  epitope
INVEN

SEQ ID NO: 1304 - protein, 4 aa, Artificial Sequence
  epitope
NVEN

SEQ ID NO: 1305 - protein, 6 aa, Artificial Sequence
  epitope
NRRALR

SEQ ID NO: 1306 - protein, 15 aa, Artificial Sequence
  epitope
  misc_feature (2)..(2): Xaa can be any naturally occurring amino acid
  misc_feature (5)..(7): Xaa can be any naturally occurring amino acid
  misc_feature (13)..(15): Xaa can be any naturally occurring amino acid
SXNVXXXEDNRRXXX

SEQ ID NO: 1307 - protein, 4 aa, Artificial Sequence
  epitope
NVEN

SEQ ID NO: 1308 - protein, 15 aa, Artificial Sequence
  epitope
  misc_feature (4)..(4): Xaa can be any naturally occurring amino acid
  misc_feature (6)..(7): Xaa can be any naturally occurring amino acid
  misc_feature (9)..(9): Xaa can be any naturally occurring amino acid
  misc_feature (12)..(15): Xaa can be any naturally occurring amino acid
SINXEXXEXNRXXXX

SEQ ID NO: 1309 - protein, 15 aa, Artificial Sequence
  epitope
  misc_feature (1)..(2): Xaa can be any naturally occurring amino acid
  misc_feature (7)..(7): Xaa can be any naturally occurring amino acid
  misc_feature (12)..(15): Xaa can be any naturally occurring amino acid
XXNVENXEDNRXXXX

SEQ ID NO: 1310 - protein, 15 aa, Artificial Sequence
  epitope
  misc_feature (1)..(7): Xaa can be any naturally occurring amino acid
  misc_feature (12)..(15): Xaa can be any naturally occurring amino acid
XXXXXXXEDNRXXXX

SEQ ID NO: 1311 - protein, 4 aa, Artificial Sequence
  epitope
NVEN

SEQ ID NO: 1312 - protein, 15 aa, Artificial Sequence
  epitope
  misc_feature (4)..(9): Xaa can be any naturally occurring amino acid
  misc_feature (12)..(15): Xaa can be any naturally occurring amino acid
SINXXXXXXNRXXXX

SEQ ID NO: 1313 - protein, 4 aa, Artificial Sequence
  epitope
NVEN

SEQ ID NO: 1314 - protein, 15 aa, Artificial Sequence
  epitope
  misc_feature (6)..(8): Xaa can be any naturally occurring amino acid
  misc_feature (10)..(10): Xaa can be any naturally occurring amino acid
  misc_feature (12)..(15): Xaa can be any naturally occurring amino acid
SINVEXXXDXRXXXX

SEQ ID NO: 1315 - protein, 15 aa, Artificial Sequence
  epitope
  misc_feature (6)..(10): Xaa can be any naturally occurring amino acid
  misc_feature (12)..(15): Xaa can be any naturally occurring amino acid
SINVEXXXXXRXXXX

SEQ ID NO: 1316 - protein, 9 aa, Artificial Sequence
  epitope
VEDNRRALR

SEQ ID NO: 1317 - protein, 15 aa, Artificial Sequence
  epitope
  misc_feature (1)..(2): Xaa can be any naturally occurring amino acid
  misc_feature (5)..(5): Xaa can be any naturally occurring amino acid
  misc_feature (7)..(7): Xaa can be any naturally occurring amino acid
  misc_feature (9)..(9): Xaa can be any naturally occurring amino acid
  misc_feature (12)..(15): Xaa can be any naturally occurring amino acid
XXNVXNXEXNRXXXX

SEQ ID NO: 1318 - protein, 15 aa, Artificial Sequence
  epitope
  misc_feature (1)..(1): Xaa can be any naturally occurring amino acid
  misc_feature (12)..(15): Xaa can be any naturally occurring amino acid
XINVENVEDNRXXXX

SEQ ID NO: 1319 - protein, 15 aa, Artificial Sequence
  epitope
  misc_feature (1)..(3): Xaa can be any naturally occurring amino acid
  misc_feature (8)..(8): Xaa can be any naturally occurring amino acid
  misc_feature (11)..(15): Xaa can be any naturally occurring amino acid
XXXVENVXDNXXXXX

SEQ ID NO: 1320 - protein, 4 aa, Artificial Sequence
  epitope
NVEN

SEQ ID NO: 1321 - protein, 15 aa, Artificial Sequence
  epitope
  misc_feature (2)..(2): Xaa can be any naturally occurring amino acid
  misc_feature (14)..(15): Xaa can be any naturally occurring amino acid
SXNVENVEDNRRAXX

SEQ ID NO: 1322 - protein, 15 aa, Artificial Sequence
  epitope
  misc_feature (1)..(4): Xaa can be any naturally occurring amino acid
  misc_feature (13)..(15): Xaa can be any naturally occurring amino acid
XXXXENVEDNRRXXX

SEQ ID NO: 1323 - protein, 15 aa, Artificial Sequence
  epitope
  misc_feature (1)..(5): Xaa can be any naturally occurring amino acid
  misc_feature (7)..(7): Xaa can be any naturally occurring amino acid
  misc_feature (13)..(15): Xaa can be any naturally occurring amino acid
XXXXXNXEDNRRXXX

SEQ ID NO: 1324 - protein, 5 aa, Artificial Sequence
  epitope
INVEN

SEQ ID NO: 1325 - protein, 5 aa, Artificial Sequence
  epitope
  misc_feature (1)..(1): Xaa can be any naturally occurring amino acid
XNVEN

SEQ ID NO: 1326 - protein, 8 aa, Artificial Sequence
  epitope
EDNRRALR

SEQ ID NO: 1327 - protein, 8 aa, Artificial Sequence
  epitope
  misc_feature (7)..(8): Xaa can be any naturally occurring amino acid
EDNRRAXX

SEQ ID NO: 1328 - protein, 8 aa, Artificial Sequence
  epitope
  misc_feature (6)..(8): Xaa can be any naturally occurring amino acid
EDNRRXXX

SEQ ID NO: 1329 - protein, 15 aa, Artificial Sequence
  epitope
  misc_feature (1)..(1): Xaa can be any naturally occurring amino acid
  misc_feature (3)..(3): Xaa can be any naturally occurring amino acid
  misc_feature (6)..(7): Xaa can be any naturally occurring amino acid
  misc_feature (12)..(12): Xaa can be any naturally occurring amino acid
  misc_feature (15)..(15): Xaa can be any naturally occurring amino acid
XIXVEXXEDNRXALX

SEQ ID NO: 1330 - protein, 15 aa, Artificial Sequence
  epitope
  misc_feature (1)..(1): Xaa can be any naturally occurring amino acid
  misc_feature (3)..(3): Xaa can be any naturally occurring amino acid
  misc_feature (6)..(7): Xaa can be any naturally occurring amino acid
  misc_feature (12)..(15): Xaa can be any naturally occurring amino acid
XIXVEXXEDNRXXXX

SEQ ID NO: 1331 - protein, 15 aa, Artificial Sequence
  epitope
  misc_feature (1)..(1): Xaa can be any naturally occurring amino acid
  misc_feature (3)..(3): Xaa can be any naturally occurring amino acid
  misc_feature (6)..(8): Xaa can be any naturally occurring amino acid
  misc_feature (12)..(15): Xaa can be any naturally occurring amino acid
XIXVEXXXDNRXXXX

SEQ ID NO: 1332 - protein, 6 aa, Artificial Sequence
  epitope
SINVEN

SEQ ID NO: 1333 - protein, 5 aa, Artificial Sequence
  epitope
INVEN

SEQ ID NO: 1334 - protein, 15 aa, Artificial Sequence
  epitope
  misc_feature (13)..(15): Xaa can be any naturally occurring amino acid
SINVENVEDNRRXXX

SEQ ID NO: 1335 - protein, 15 aa, Artificial Sequence
  epitope
  misc_feature (12)..(15): Xaa can be any naturally occurring amino acid
SINVENVEDNRXXXX

SEQ ID NO: 1336 - protein, 4 aa, Artificial Sequence
  epitope
NVEN

SEQ ID NO: 1337 - protein, 15 aa, Artificial Sequence
  epitope
  misc_feature (1)..(1): Xaa can be any naturally occurring amino acid
  misc_feature (3)..(5): Xaa can be any naturally occurring amino acid
  misc_feature (13)..(15): Xaa can be any naturally occurring amino acid
XIXXXNVEDNRRXXX

SEQ ID NO: 1338 - protein, 15 aa, Artificial Sequence
  epitope
  misc_feature (1)..(1): Xaa can be any naturally occurring amino acid
  misc_feature (3)..(6): Xaa can be any naturally occurring amino acid
  misc_feature (13)..(15): Xaa can be any naturally occurring amino acid
XIXXXXVEDNRRXXX

SEQ ID NO: 1339 - protein, 5 aa, Artificial Sequence
  epitope
INVEN

SEQ ID NO: 1340 - protein, 4 aa, Artificial Sequence
  epitope
NVEN

SEQ ID NO: 1341 - protein, 6 aa, Artificial Sequence
  epitope
NRRALR

SEQ ID NO: 1342 - protein, 15 aa, Artificial Sequence
  epitope
  misc_feature (12)..(15): Xaa can be any naturally occurring amino acid
SINVENVEDNRXXXX

SEQ ID NO: 1343 - protein, 15 aa, Artificial Sequence
  epitope
  misc_feature (1)..(1): Xaa can be any naturally occurring amino acid
  misc_feature (12)..(15): Xaa can be any naturally occurring amino acid
XINVENVEDNRXXXX

SEQ ID NO: 1344 - protein, 5 aa, Artificial Sequence
  epitope
INVEN

SEQ ID NO: 1345 - protein, 4 aa, Artificial Sequence
  epitope
NVEN

SEQ ID NO: 1346 - protein, 6 aa, Artificial Sequence
  epitope
NRRALR

SEQ ID NO: 1347 - protein, 15 aa, Artificial Sequence
  epitope
  misc_feature (1)..(1): Xaa can be any naturally occurring amino acid
  misc_feature (3)..(3): Xaa can be any naturally occurring amino acid
  misc_feature (15)..(15): Xaa can be any naturally occurring amino acid
XIXVENVEDNRRALX

SEQ ID NO: 1348 - protein, 15 aa, Artificial Sequence
  epitope
  misc_feature (1)..(1): Xaa can be any naturally occurring amino acid
  misc_feature (3)..(3): Xaa can be any naturally occurring amino acid
  misc_feature (14)..(15): Xaa can be any naturally occurring amino acid
XIXVENVEDNRRAXX

SEQ ID NO: 1349 - protein, 15 aa, Artificial Sequence
  epitope
  misc_feature (1)..(4): Xaa can be any naturally occurring amino acid
  misc_feature (6)..(6): Xaa can be any naturally occurring amino acid
  misc_feature (9)..(9): Xaa can be any naturally occurring amino acid
  misc_feature (13)..(15): Xaa can be any naturally occurring amino acid
XXXXEXVEXNRRXXX

SEQ ID NO: 1350 - protein, 6 aa, Artificial Sequence
  epitope
SINVEN

SEQ ID NO: 1351 - protein, 5 aa, Artificial Sequence
  epitope
INVEN

SEQ ID NO: 1352 - protein, 5 aa, Artificial Sequence
  epitope
  misc_feature (2)..(2): Xaa can be any naturally occurring amino acid
IXVEN

SEQ ID NO: 1353 - protein, 4 aa, Artificial Sequence
  epitope
NVEN

SEQ ID NO: 1354 - protein, 9 aa, Artificial Sequence
  epitope
VEDNRRALR

SEQ ID NO: 1355 - protein, 15 aa, Artificial Sequence
  epitope
  misc_feature (1)..(3): Xaa can be any naturally occurring amino acid
  misc_feature (5)..(5): Xaa can be any naturally occurring amino acid
  misc_feature (8)..(8): Xaa can be any naturally occurring amino acid
  misc_feature (13)..(15): Xaa can be any naturally occurring amino acid
XXXVXNVXDNRRXXX

SEQ ID NO: 1356 - protein, 5 aa, Artificial Sequence
  epitope
INVEN

SEQ ID NO: 1357 - protein, 4 aa, Artificial Sequence
  epitope
NVEN

SEQ ID NO: 1358 - protein, 9 aa, Artificial Sequence
  epitope
VEDNRRALR

SEQ ID NO: 1359 - protein, 9 aa, Artificial Sequence
  epitope
  misc_feature (2)..(2): Xaa can be any naturally occurring amino acid
  misc_feature (7)..(9): Xaa can be any naturally occurring amino acid
VXDNRRXXX

SEQ ID NO: 1360 - protein, 5 aa, Artificial Sequence
  epitope
INVEN

SEQ ID NO: 1361 - protein, 4 aa, Artificial Sequence
  epitope
NVEN

SEQ ID NO: 1362 - protein, 15 aa, Artificial Sequence
  epitope
  misc_feature (14)..(15): Xaa can be any naturally occurring amino acid
SINVENVEDNRRAXX

SEQ ID NO: 1363 - protein, 15 aa, Artificial Sequence
  epitope
  misc_feature (1)..(2): Xaa can be any naturally occurring amino acid
  misc_feature (5)..(5): Xaa can be any naturally occurring amino acid
  misc_feature (13)..(15): Xaa can be any naturally occurring amino acid
XXNVXNVEDNRRXXX

SEQ ID NO: 1364 - protein, 15 aa, Artificial Sequence
  epitope
  misc_feature (1)..(2): Xaa can be any naturally occurring amino acid
  misc_feature (4)..(5): Xaa can be any naturally occurring amino acid
  misc_feature (13)..(15): Xaa can be any naturally occurring amino acid
XXNXXNVEDNRRXXX

SEQ ID NO: 1365 - protein, 6 aa, Artificial Sequence
  epitope
SINVEN

SEQ ID NO: 1366 - protein, 5 aa, Artificial Sequence
  epitope
INVEN

SEQ ID NO: 1367 - protein, 15 aa, Artificial Sequence
  epitope
KPWQQQPLPPQQQPP

SEQ ID NO: 1368 - protein, 6 aa, Artificial Sequence
  epitope
KPWQQQ

SEQ ID NO: 1369 - protein, 8 aa, Artificial Sequence
  epitope
QQPLPPQQ

SEQ ID NO: 1370 - protein, 7 aa, Artificial Sequence
  epitope
QPLPPQQ

SEQ ID NO: 1371 - protein, 9 aa, Artificial Sequence
  epitope
QPLPPQQQP

SEQ ID NO: 1372 - protein, 8 aa, Artificial Sequence
  epitope
QPLPPQQQ

SEQ ID NO: 1373 - protein, 9 aa, Artificial Sequence
  epitope
KPWQQQPLP

SEQ ID NO: 1374 - protein, 8 aa, Artificial Sequence
  epitope
PWQQQPLP

SEQ ID NO: 1375 - protein, 7 aa, Artificial Sequence
  epitope
PWQQQPL

SEQ ID NO: 1376 - protein, 15 aa, Artificial Sequence
  epitope
  misc_feature (9)..(11): Xaa can be any naturally occurring amino acid
  misc_feature (13)..(14): Xaa can be any naturally occurring amino acid
KPWQQQPLXXXQXXP

SEQ ID NO: 1377 - protein, 15 aa, Artificial Sequence
  epitope
  misc_feature (1)..(1): Xaa can be any naturally occurring amino acid
  misc_feature (6)..(15): Xaa can be any naturally occurring amino acid
XPWQQXXXXXXXXXX

SEQ ID NO: 1378 - protein, 10 aa, Artificial Sequence
  epitope
QQPLPPQQQP

SEQ ID NO: 1379 - protein, 10 aa, Artificial Sequence
  epitope
  misc_feature (5)..(7): Xaa can be any naturally occurring amino acid
  misc_feature (9)..(10): Xaa can be any naturally occurring amino acid
QQPLXXXQXX

SEQ ID NO: 1380 - protein, 10 aa, Artificial Sequence
  epitope
PWQQQPLPPQ

SEQ ID NO: 1381 - protein, 10 aa, Artificial Sequence
  epitope
PWQQQPLPPQ

SEQ ID NO: 1382 - protein, 9 aa, Artificial Sequence
  epitope
PWQQQPLPP

SEQ ID NO: 1383 - protein, 5 aa, Artificial Sequence
  epitope
PPQQQ

SEQ ID NO: 1384 - protein, 15 aa, Artificial Sequence
  epitope
  misc_feature (2)..(2): Xaa can be any naturally occurring amino acid
  misc_feature (4)..(4): Xaa can be any naturally occurring amino acid
  misc_feature (9)..(15): Xaa can be any naturally occurring amino acid
KXWXQQPLXXXXXXX

SEQ ID NO: 1385 - protein, 9 aa, Artificial Sequence
  epitope
KPWQQQPLP

SEQ ID NO: 1386 - protein, 9 aa, Artificial Sequence
  epitope
  misc_feature (2)..(2): Xaa can be any naturally occurring amino acid
  misc_feature (4)..(4): Xaa can be any naturally occurring amino acid
  misc_feature (9)..(9): Xaa can be any naturally occurring amino acid
KXWXQQPLX

SEQ ID NO: 1387 - protein, 10 aa, Artificial Sequence
  epitope
QQQPLPPQQQ

SEQ ID NO: 1388 - protein, 9 aa, Artificial Sequence
  epitope
QQPLPPQQQ

SEQ ID NO: 1389 - protein, 9 aa, Artificial Sequence
  epitope
  misc_feature (5)..(9): Xaa can be any naturally occurring amino acid
QQPLXXXXX

SEQ ID NO: 1390 - protein, 5 aa, Artificial Sequence
  epitope
PWQQQ

SEQ ID NO: 1391 - protein, 8 aa, Artificial Sequence
  epitope
QPLPPQQQ

SEQ ID NO: 1392 - protein, 10 aa, Artificial Sequence
  epitope
KPWQQQPLPP

SEQ ID NO: 1393 - protein, 8 aa, Artificial Sequence
  epitope
QPLPPQQQ

SEQ ID NO: 1394 - protein, 4 aa, Artificial Sequence
  epitope
QPLP

SEQ ID NO: 1395 - protein, 15 aa, Artificial Sequence
  epitope
  misc_feature (6)..(7): Xaa can be any naturally occurring amino acid
  misc_feature (9)..(10): Xaa can be any naturally occurring amino acid
KPWQQXXLXXQQQPP

SEQ ID NO: 1396 - protein, 15 aa, Artificial Sequence
  epitope
  misc_feature (6)..(12): Xaa can be any naturally occurring amino acid
  misc_feature (15)..(15): Xaa can be any naturally occurring amino acid
KPWQQXXXXXXXQPX

SEQ ID NO: 1397 - protein, 15 aa, Artificial Sequence
  epitope
  misc_feature (1)..(1): Xaa can be any naturally occurring amino acid
  misc_feature (6)..(15): Xaa can be any naturally occurring amino acid
XPWQQXXXXXXXXXX

SEQ ID NO: 1398 - protein, 10 aa, Artificial Sequence
  epitope
KPWQQQPLPP

SEQ ID NO: 1399 - protein, 10 aa, Artificial Sequence
  epitope
  misc_feature (6)..(7): Xaa can be any naturally occurring amino acid
  misc_feature (9)..(10): Xaa can be any naturally occurring amino acid
KPWQQXXLXX

SEQ ID NO: 1400 - protein, 10 aa, Artificial Sequence
  epitope
  misc_feature (6)..(10): Xaa can be any naturally occurring amino acid
KPWQQXXXXX

SEQ ID NO: 1401 - protein, 6 aa, Artificial Sequence
  epitope
KPWQQQ

SEQ ID NO: 1402 - protein, 6 aa, Artificial Sequence
  epitope
  misc_feature (6)..(6): Xaa can be any naturally occurring amino acid
KPWQQX

SEQ ID NO: 1403 - protein, 15 aa, Artificial Sequence
  epitope
QYLQPQQPISQQQAQ

SEQ ID NO: 1404 - protein, 15 aa, Artificial Sequence
  epitope
  misc_feature (1)..(1): Xaa can be any naturally occurring amino acid
  misc_feature (3)..(8): Xaa can be any naturally occurring amino acid
  misc_feature (10)..(10): Xaa can be any naturally occurring amino acid
  misc_feature (12)..(14): Xaa can be any naturally occurring amino acid
XYXXXXXXIXQXXXQ

SEQ ID NO: 1405 - protein, 10 aa, Artificial Sequence
  epitope
YLQPQQPISQ

SEQ ID NO: 1406 - protein, 15 aa, Artificial Sequence
  epitope
  misc_feature (1)..(1): Xaa can be any naturally occurring amino acid
  misc_feature (3)..(4): Xaa can be any naturally occurring amino acid
  misc_feature (8)..(8): Xaa can be any naturally occurring amino acid
  misc_feature (10)..(11): Xaa can be any naturally occurring amino acid
  misc_feature (14)..(15): Xaa can be any naturally occurring amino acid
XYXXPQQXIXXQQXX

SEQ ID NO: 1407 - protein, 10 aa, Artificial Sequence
  epitope
YLQPQQPISQ

SEQ ID NO: 1408 - protein, 10 aa, Artificial Sequence
  epitope
  misc_feature (2)..(3): Xaa can be any naturally occurring amino acid
  misc_feature (7)..(7): Xaa can be any naturally occurring amino acid
  misc_feature (9)..(10): Xaa can be any naturally occurring amino acid
YXXPQQXIXX

SEQ ID NO: 1409 - protein, 10 aa, Artificial Sequence
  epitope
QPQQPISQQQ

SEQ ID NO: 1410 - protein, 10 aa, Artificial Sequence
  epitope
  misc_feature (1)..(1): Xaa can be any naturally occurring amino acid
  misc_feature (5)..(5): Xaa can be any naturally occurring amino acid
  misc_feature (7)..(8): Xaa can be any naturally occurring amino acid
XPQQXIXXQQ

SEQ ID NO: 1411 - protein, 10 aa, Artificial Sequence
  epitope
QQPISQQQAQ

SEQ ID NO: 1412 - protein, 10 aa, Artificial Sequence
  epitope
  misc_feature (3)..(3): Xaa can be any naturally occurring amino acid
  misc_feature (5)..(6): Xaa can be any naturally occurring amino acid
  misc_feature (9)..(10): Xaa can be any naturally occurring amino acid
QQXIXXQQXX

SEQ ID NO: 1413 - protein, 15 aa, Artificial Sequence
  epitope
  misc_feature (1)..(6): Xaa can be any naturally occurring amino acid
  misc_feature (8)..(8): Xaa can be any naturally occurring amino acid
  misc_feature (10)..(10): Xaa can be any naturally occurring amino acid
  misc_feature (12)..(12): Xaa can be any naturally occurring amino acid
  misc_feature (14)..(14): Xaa can be any naturally occurring amino acid
XXXXXXQXIXQXQXQ

SEQ ID NO: 1414 - protein, 10 aa, Artificial Sequence
  epitope
YLQPQQPISQ

SEQ ID NO: 1415 - protein, 9 aa, Artificial Sequence
  epitope
YLQPQQPIS

SEQ ID NO: 1416 - protein, 9 aa, Artificial Sequence
  epitope
YLQPQQPIS

SEQ ID NO: 1417 - protein, 10 aa, Artificial Sequence
  epitope
QQPISQQQAQ

SEQ ID NO: 1418 - protein, 10 aa, Artificial Sequence
  epitope
YLQPQQPISQ

SEQ ID NO: 1419 - protein, 9 aa, Artificial Sequence
  epitope
YLQPQQPIS

SEQ ID NO: 1420 - protein, 5 aa, Artificial Sequence
  epitope
SQQQA

SEQ ID NO: 1421 - protein, 9 aa, Artificial Sequence
  epitope
YLQPQQPIS

SEQ ID NO: 1422 - protein, 6 aa, Artificial Sequence
  epitope
YLQPQQ

SEQ ID NO: 1423 - protein, 5 aa, Artificial Sequence
  epitope
YLQPQ

SEQ ID NO: 1424 - protein, 5 aa, Artificial Sequence
  epitope
SQQQA

SEQ ID NO: 1425 - protein, 9 aa, Artificial Sequence
  epitope
YLQPQQPIS

SEQ ID NO: 1426 - protein, 5 aa, Artificial Sequence
  epitope
YLQPQ

SEQ ID NO: 1427 - protein, 10 aa, Artificial Sequence
  epitope
YLQPQQPISQ

SEQ ID NO: 1428 - protein, 9 aa, Artificial Sequence
  epitope
YLQPQQPIS

SEQ ID NO: 1429 - protein, 6 aa, Artificial Sequence
  epitope
YLQPQQ

SEQ ID NO: 1430 - protein, 9 aa, Artificial Sequence
  epitope
YLQPQQPIS

SEQ ID NO: 1431 - protein, 7 aa, Artificial Sequence
  epitope
YLQPQQP

SEQ ID NO: 1432 - protein, 6 aa, Artificial Sequence
  epitope
SQQQAQ

SEQ ID NO: 1433 - protein, 15 aa, Artificial Sequence
  epitope
  misc_feature (1)..(1): Xaa can be any naturally occurring amino acid
  misc_feature (3)..(4): Xaa can be any naturally occurring amino acid
  misc_feature (6)..(6): Xaa can be any naturally occurring amino acid
  misc_feature (10)..(12): Xaa can be any naturally occurring amino acid
  misc_feature (14)..(14): Xaa can be any naturally occurring amino acid
XYXXPXQPIXXXQXQ

SEQ ID NO: 1434 - protein, 8 aa, Artificial Sequence
  epitope
YLQPQQPI

SEQ ID NO: 1435 - protein, 8 aa, Artificial Sequence
  epitope
  misc_feature (2)..(3): Xaa can be any naturally occurring amino acid
  misc_feature (5)..(5): Xaa can be any naturally occurring amino acid
YXXPXQPI

SEQ ID NO: 1436 - protein, 6 aa, Artificial Sequence
  epitope
LQPQQP

SEQ ID NO: 1437 - protein, 10 aa, Artificial Sequence
  epitope
PQQPISQQQA

SEQ ID NO: 1438 - protein, 10 aa, Artificial Sequence
  epitope
  misc_feature (2)..(2): Xaa can be any naturally occurring amino acid
  misc_feature (6)..(8): Xaa can be any naturally occurring amino acid
  misc_feature (10)..(10): Xaa can be any naturally occurring amino acid
PXQPIXXXQX

SEQ ID NO: 1439 - protein, 5 aa, Artificial Sequence
  epitope
SQQQA

SEQ ID NO: 1440 - protein, 15 aa, Artificial Sequence
  epitope
  misc_feature (1)..(1): Xaa can be any naturally occurring amino acid
  misc_feature (3)..(6): Xaa can be any naturally occurring amino acid
  misc_feature (8)..(10): Xaa can be any naturally occurring amino acid
  misc_feature (12)..(12): Xaa can be any naturally occurring amino acid
  misc_feature (14)..(14): Xaa can be any naturally occurring amino acid
XYXXXXQXXXQXQXQ

SEQ ID NO: 1441 - protein, 10 aa, Artificial Sequence
  epitope
YLQPQQPISQ

SEQ ID NO: 1442 - protein, 9 aa, Artificial Sequence
  epitope
YLQPQQPIS

SEQ ID NO: 1443 - protein, 5 aa, Artificial Sequence
  epitope
SQQQA

SEQ ID NO: 1444 - protein, 9 aa, Artificial Sequence
  epitope
YLQPQQPIS

SEQ ID NO: 1445 - protein, 5 aa, Artificial Sequence
  epitope
YLQPQ

SEQ ID NO: 1446 - protein, 9 aa, Artificial Sequence
  epitope
PQQPISQQQ

SEQ ID NO: 1447 - protein, 8 aa, Artificial Sequence
  epitope
QQPISQQQ

SEQ ID NO: 1448 - protein, 15 aa, Artificial Sequence
  epitope
  misc_feature (1)..(1): Xaa can be any naturally occurring amino acid
  misc_feature (4)..(4): Xaa can be any naturally occurring amino acid
  misc_feature (6)..(6): Xaa can be any naturally occurring amino acid
  misc_feature (8)..(8): Xaa can be any naturally occurring amino acid
  misc_feature (10)..(10): Xaa can be any naturally occurring amino acid
  misc_feature (14)..(14): Xaa can be any naturally occurring amino acid
XYLXPXQXIXQQQXQ

SEQ ID NO: 1449 - protein, 15 aa, Artificial Sequence
  epitope
  misc_feature (1)..(1): Xaa can be any naturally occurring amino acid
  misc_feature (4)..(4): Xaa can be any naturally occurring amino acid
  misc_feature (6)..(6): Xaa can be any naturally occurring amino acid
  misc_feature (8)..(8): Xaa can be any naturally occurring amino acid
  misc_feature (10)..(11): Xaa can be any naturally occurring amino acid
  misc_feature (14)..(14): Xaa can be any naturally occurring amino acid
XYLXPXQXIXXQQXQ

SEQ ID NO: 1450 - protein, 10 aa, Artificial Sequence
  epitope
YLQPQQPISQ

SEQ ID NO: 1451 - protein, 9 aa, Artificial Sequence
  epitope
LQPQQPISQ

SEQ ID NO: 1452 - protein, 9 aa, Artificial Sequence
  epitope
  misc_feature (2)..(2): Xaa can be any naturally occurring amino acid
  misc_feature (4)..(4): Xaa can be any naturally occurring amino acid
  misc_feature (6)..(6): Xaa can be any naturally occurring amino acid
  misc_feature (8)..(8): Xaa can be any naturally occurring amino acid
LXPXQXIXQ

SEQ ID NO: 1453 - protein, 9 aa, Artificial Sequence
  epitope
  misc_feature (2)..(2): Xaa can be any naturally occurring amino acid
  misc_feature (4)..(4): Xaa can be any naturally occurring amino acid
  misc_feature (6)..(6): Xaa can be any naturally occurring amino acid
  misc_feature (8)..(9): Xaa can be any naturally occurring amino acid
LXPXQXIXX

SEQ ID NO: 1454 - protein, 10 aa, Artificial Sequence
  epitope
QQPISQQQAQ

SEQ ID NO: 1455 - protein, 10 aa, Artificial Sequence
  epitope
  misc_feature (1)..(1): Xaa can be any naturally occurring amino acid
  misc_feature (3)..(3): Xaa can be any naturally occurring amino acid
  misc_feature (5)..(5): Xaa can be any naturally occurring amino acid
  misc_feature (9)..(9): Xaa can be any naturally occurring amino acid
XQXIXQQQXQ

SEQ ID NO: 1456 - protein, 10 aa, Artificial Sequence
  epitope
  misc_feature (1)..(1): Xaa can be any naturally occurring amino acid
  misc_feature (3)..(3): Xaa can be any naturally occurring amino acid
  misc_feature (5)..(6): Xaa can be any naturally occurring amino acid
  misc_feature (9)..(9): Xaa can be any naturally occurring amino acid
XQXIXXQQXQ

SEQ ID NO: 1457 - protein, 15 aa, Artificial Sequence
  epitope
  misc_feature (1)..(1): Xaa can be any naturally occurring amino acid
  misc_feature (4)..(4): Xaa can be any naturally occurring amino acid
  misc_feature (8)..(8): Xaa can be any naturally occurring amino acid
  misc_feature (12)..(12): Xaa can be any naturally occurring amino acid
  misc_feature (14)..(14): Xaa can be any naturally occurring amino acid
XYLXPQQXISQXQXQ

SEQ ID NO: 1458 - protein, 15 aa, Artificial Sequence
  epitope
  misc_feature (1)..(2): Xaa can be any naturally occurring amino acid
  misc_feature (4)..(4): Xaa can be any naturally occurring amino acid
  misc_feature (6)..(6): Xaa can be any naturally occurring amino acid
  misc_feature (8)..(8): Xaa can be any naturally occurring amino acid
  misc_feature (11)..(12): Xaa can be any naturally occurring amino acid
  misc_feature (14)..(14): Xaa can be any naturally occurring amino acid
XXLXPXQXISXXQXQ

SEQ ID NO: 1459 - protein, 10 aa, Artificial Sequence
  epitope
YLQPQQPISQ

SEQ ID NO: 1460 - protein, 9 aa, Artificial Sequence
  epitope
LQPQQPISQ

SEQ ID NO: 1461 - protein, 9 aa, Artificial Sequence
  epitope
  misc_feature (2)..(2): Xaa can be any naturally occurring amino acid
  misc_feature (6)..(6): Xaa can be any naturally occurring amino acid
LXPQQXISQ

SEQ ID NO: 1462 - protein, 9 aa, Artificial Sequence
  epitope
  misc_feature (2)..(2): Xaa can be any naturally occurring amino acid
  misc_feature (4)..(4): Xaa can be any naturally occurring amino acid
  misc_feature (6)..(6): Xaa can be any naturally occurring amino acid
  misc_feature (9)..(9): Xaa can be any naturally occurring amino acid
LXPXQXISX

SEQ ID NO: 1463 - protein, 10 aa, Artificial Sequence
  epitope
QQPISQQQAQ

SEQ ID NO: 1464 - protein, 9 aa, Artificial Sequence
  epitope
QQPISQQQA

SEQ ID NO: 1465 - protein, 9 aa, Artificial Sequence
  epitope
  misc_feature (3)..(3): Xaa can be any naturally occurring amino acid
  misc_feature (7)..(7): Xaa can be any naturally occurring amino acid
  misc_feature (9)..(9): Xaa can be any naturally occurring amino acid
QQXISQXQX

SEQ ID NO: 1466 - protein, 9 aa, Artificial Sequence
  epitope
  misc_feature (1)..(1): Xaa can be any naturally occurring amino acid
  misc_feature (3)..(3): Xaa can be any naturally occurring amino acid
  misc_feature (6)..(7): Xaa can be any naturally occurring amino acid
  misc_feature (9)..(9): Xaa can be any naturally occurring amino acid
XQXISXXQX

SEQ ID NO: 1467 - protein, 9 aa, Artificial Sequence
  epitope
YLQPQQPIS

SEQ ID NO: 1468 - protein, 7 aa, Artificial Sequence
  epitope
YLQPQQP

SEQ ID NO: 1469 - protein, 15 aa, Artificial Sequence
  epitope
  misc_feature (1)..(1): Xaa can be any naturally occurring amino acid
  misc_feature (3)..(4): Xaa can be any naturally occurring amino acid
  misc_feature (6)..(6): Xaa can be any naturally occurring amino acid
  misc_feature (8)..(8): Xaa can be any naturally occurring amino acid
  misc_feature (12)..(12): Xaa can be any naturally occurring amino acid
  misc_feature (14)..(14): Xaa can be any naturally occurring amino acid
XYXXPXQXISQXQXQ

SEQ ID NO: 1470 - protein, 15 aa, Artificial Sequence
  epitope
  misc_feature (1)..(6): Xaa can be any naturally occurring amino acid
  misc_feature (8)..(8): Xaa can be any naturally occurring amino acid
  misc_feature (10)..(10): Xaa can be any naturally occurring amino acid
  misc_feature (12)..(12): Xaa can be any naturally occurring amino acid
  misc_feature (14)..(14): Xaa can be any naturally occurring amino acid
XXXXXXQXIXQXQXQ

SEQ ID NO: 1471 - protein, 15 aa, Artificial Sequence
  epitope
  misc_feature (1)..(8): Xaa can be any naturally occurring amino acid
  misc_feature (10)..(10): Xaa can be any naturally occurring amino acid
  misc_feature (12)..(12): Xaa can be any naturally occurring amino acid
  misc_feature (14)..(14): Xaa can be any naturally occurring amino acid
XXXXXXXXIXQXQXQ

SEQ ID NO: 1472 - protein, 9 aa, Artificial Sequence
  epitope
YLQPQQPIS

SEQ ID NO: 1473 - protein, 9 aa, Artificial Sequence
  epitope
  misc_feature (2)..(3): Xaa can be any naturally occurring amino acid
  misc_feature (5)..(5): Xaa can be any naturally occurring amino acid
  misc_feature (7)..(7): Xaa can be any naturally occurring amino acid
YXXPXQXIS

SEQ ID NO: 1474 - protein, 8 aa, Artificial Sequence
  epitope
LQPQQPIS

SEQ ID NO: 1475 - protein, 8 aa, Artificial Sequence
  epitope
  misc_feature (1)..(2): Xaa can be any naturally occurring amino acid
  misc_feature (4)..(4): Xaa can be any naturally occurring amino acid
  misc_feature (6)..(6): Xaa can be any naturally occurring amino acid
XXPXQXIS

SEQ ID NO: 1476 - protein, 15 aa, Artificial Sequence
  epitope
  misc_feature (1)..(1): Xaa can be any naturally occurring amino acid
  misc_feature (3)..(5): Xaa can be any naturally occurring amino acid
  misc_feature (7)..(8): Xaa can be any naturally occurring amino acid
  misc_feature (10)..(11): Xaa can be any naturally occurring amino acid
  misc_feature (14)..(15): Xaa can be any naturally occurring amino acid
XYXXXQXXIXXQQXX

SEQ ID NO: 1477 - protein, 10 aa, Artificial Sequence
  epitope
YLQPQQPISQ

SEQ ID NO: 1478 - protein, 9 aa, Artificial Sequence
  epitope
YLQPQQPIS

SEQ ID NO: 1479 - protein, 10 aa, Artificial Sequence
  epitope
YLQPQQPISQ

SEQ ID NO: 1480 - protein, 9 aa, Artificial Sequence
  epitope
YLQPQQPIS

SEQ ID NO: 1481 - protein, 15 aa, Artificial Sequence
  epitope
  misc_feature (1)..(1): Xaa can be any naturally occurring amino acid
  misc_feature (3)..(4): Xaa can be any naturally occurring amino acid
  misc_feature (6)..(6): Xaa can be any naturally occurring amino acid
  misc_feature (8)..(8): Xaa can be any naturally occurring amino acid
  misc_feature (10)..(14): Xaa can be any naturally occurring amino acid
XYXXPXQXIXXXXXQ

SEQ ID NO: 1482 - protein, 10 aa, Artificial Sequence
  epitope
YLQPQQPISQ

SEQ ID NO: 1483 - protein, 9 aa, Artificial Sequence
  epitope
YLQPQQPIS

SEQ ID NO: 1484 - protein, 7 aa, Artificial Sequence
  epitope
YLQPQQP

SEQ ID NO: 1485 - protein, 5 aa, Artificial Sequence
  epitope
SQQQA

SEQ ID NO: 1486 - protein, 15 aa, Artificial Sequence
  epitope
  misc_feature (1)..(1): Xaa can be any naturally occurring amino acid
  misc_feature (3)..(6): Xaa can be any naturally occurring amino acid
  misc_feature (8)..(8): Xaa can be any naturally occurring amino acid
  misc_feature (10)..(10): Xaa can be any naturally occurring amino acid
  misc_feature (14)..(14): Xaa can be any naturally occurring amino acid
XYXXXXQXIXQQQXQ

SEQ ID NO: 1487 - protein, 10 aa, Artificial Sequence
  epitope
YLQPQQPISQ

SEQ ID NO: 1488 - protein, 9 aa, Artificial Sequence
  epitope
YLQPQQPIS

SEQ ID NO: 1489 - protein, 10 aa, Artificial Sequence
  epitope
QQPISQQQAQ

SEQ ID NO: 1490 - protein, 10 aa, Artificial Sequence
  epitope
  misc_feature (1)..(1): Xaa can be any naturally occurring amino acid
  misc_feature (3)..(3): Xaa can be any naturally occurring amino acid
  misc_feature (5)..(5): Xaa can be any naturally occurring amino acid
  misc_feature (9)..(9): Xaa can be any naturally occurring amino acid
XQXIXQQQXQ

SEQ ID NO: 1491 - protein, 15 aa, Artificial Sequence
  epitope
  misc_feature (1)..(1): Xaa can be any naturally occurring amino acid
  misc_feature (3)..(6): Xaa can be any naturally occurring amino acid
  misc_feature (8)..(9): Xaa can be any naturally occurring amino acid
  misc_feature (11)..(11): Xaa can be any naturally occurring amino acid
  misc_feature (14)..(14): Xaa can be any naturally occurring amino acid
XYXXXXQXXSXQQXQ

SEQ ID NO: 1492 - protein, 10 aa, Artificial Sequence
  epitope
YLQPQQPISQ

SEQ ID NO: 1493 - protein, 9 aa, Artificial Sequence
  epitope
YLQPQQPIS

SEQ ID NO: 1494 - protein, 10 aa, Artificial Sequence
  epitope
YLQPQQPISQ

SEQ ID NO: 1495 - protein, 8 aa, Artificial Sequence
  epitope
YLQPQQPI

SEQ ID NO: 1496 - protein, 15 aa, Artificial Sequence
  epitope
  misc_feature (1)..(4): Xaa can be any naturally occurring amino acid
  misc_feature (8)..(8): Xaa can be any naturally occurring amino acid
  misc_feature (10)..(12): Xaa can be any naturally occurring amino acid
XXXXPQQXIXXXQAQ

SEQ ID NO: 1497 - protein, 15 aa, Artificial Sequence
  epitope
  misc_feature (1)..(4): Xaa can be any naturally occurring amino acid
  misc_feature (6)..(6): Xaa can be any naturally occurring amino acid
  misc_feature (8)..(8): Xaa can be any naturally occurring amino acid
  misc_feature (10)..(12): Xaa can be any naturally occurring amino acid
XXXXPXQXIXXXQAQ

SEQ ID NO: 1498 - protein, 15 aa, Artificial Sequence
  epitope
  misc_feature (1)..(6): Xaa can be any naturally occurring amino acid
  misc_feature (8)..(8): Xaa can be any naturally occurring amino acid
  misc_feature (10)..(13): Xaa can be any naturally occurring amino acid
XXXXXXQXIXXXXAQ

SEQ ID NO: 1499 - protein, 10 aa, Artificial Sequence
  epitope
YLQPQQPISQ

SEQ ID NO: 1500 - protein, 9 aa, Artificial Sequence
  epitope
YLQPQQPIS

SEQ ID NO: 1501 - protein, 9 aa, Artificial Sequence
  epitope
  misc_feature (1)..(3): Xaa can be any naturally occurring amino acid
  misc_feature (7)..(7): Xaa can be any naturally occurring amino acid
  misc_feature (9)..(9): Xaa can be any naturally occurring amino acid
XXXPQQXIX

SEQ ID NO: 1502 - protein, 6 aa, Artificial Sequence
  epitope
LQPQQP

SEQ ID NO: 1503 - protein, 8 aa, Artificial Sequence
  epitope
QPISQQQA

SEQ ID NO: 1504 - protein, 8 aa, Artificial Sequence
  epitope
  misc_feature (2)..(2): Xaa can be any naturally occurring amino acid
  misc_feature (4)..(6): Xaa can be any naturally occurring amino acid
QXIXXXQA

SEQ ID NO: 1505 - protein, 5 aa, Artificial Sequence
  epitope
SQQQA

SEQ ID NO: 1506 - protein, 7 aa, Artificial Sequence
  epitope
YLQPQQP

SEQ ID NO: 1507 - protein, 5 aa, Artificial Sequence
  epitope
YLQPQ

SEQ ID NO: 1508 - protein, 15 aa, Artificial Sequence
  epitope
QVPLVQQQQFLGQQQ

SEQ ID NO: 1509 - protein, 7 aa, Artificial Sequence
  epitope
QVPLVQQ

SEQ ID NO: 1510 - protein, 7 aa, Artificial Sequence
  epitope
  misc_feature (2)..(3): Xaa can be any naturally occurring amino acid
QXXLVQQ

SEQ ID NO: 1511 - protein, 15 aa, Artificial Sequence
  epitope
  misc_feature (14)..(14): Xaa can be any naturally occurring amino acid
QVPLVQQQQFLGQXQ

SEQ ID NO: 1512 - protein, 15 aa, Artificial Sequence
  epitope
  misc_feature (11)..(11): Xaa can be any naturally occurring amino acid
  misc_feature (14)..(15): Xaa can be any naturally occurring amino acid
QVPLVQQQQFXGQXX

SEQ ID NO: 1513 - protein, 15 aa, Artificial Sequence
  epitope
  misc_feature (1)..(1): Xaa can be any naturally occurring amino acid
  misc_feature (10)..(12): Xaa can be any naturally occurring amino acid
  misc_feature (14)..(15): Xaa can be any naturally occurring amino acid
XVPLVQQQQXXXQXX

SEQ ID NO: 1514 - protein, 9 aa, Artificial Sequence
  epitope
QVPLVQQQQ

SEQ ID NO: 1515 - protein, 9 aa, Artificial Sequence
  epitope
  misc_feature (1)..(1): Xaa can be any naturally occurring amino acid
XVPLVQQQQ

SEQ ID NO: 1516 - protein, 15 aa, Artificial Sequence
  epitope
  misc_feature (2)..(4): Xaa can be any naturally occurring amino acid
  misc_feature (8)..(13): Xaa can be any naturally occurring amino acid
QXXXVQQXXXXXXQQ

SEQ ID NO: 1517 - protein, 15 aa, Artificial Sequence
  epitope
  misc_feature (2)..(4): Xaa can be any naturally occurring amino acid
  misc_feature (8)..(13): Xaa can be any naturally occurring amino acid
  misc_feature (15)..(15): Xaa can be any naturally occurring amino acid
QXXXVQQXXXXXXQX

SEQ ID NO: 1518 - protein, 7 aa, Artificial Sequence
  epitope
QVPLVQQ

SEQ ID NO: 1519 - protein, 7 aa, Artificial Sequence
  epitope
  misc_feature (2)..(4): Xaa can be any naturally occurring amino acid
QXXXVQQ

SEQ ID NO: 1520 - protein, 7 aa, Artificial Sequence
  epitope
QVPLVQQ

SEQ ID NO: 1521 - protein, 7 aa, Artificial Sequence
  epitope
  misc_feature (2)..(3): Xaa can be any naturally occurring amino acid
QXXLVQQ

SEQ ID NO: 1522 - protein, 15 aa, Artificial Sequence
  epitope
  misc_feature (1)..(4): Xaa can be any naturally occurring amino acid
  misc_feature (8)..(13): Xaa can be any naturally occurring amino acid
XXXXVQQXXXXXXQQ

SEQ ID NO: 1523 - protein, 10 aa, Artificial Sequence
  epitope
QVPLVQQQQF

SEQ ID NO: 1524 - protein, 9 aa, Artificial Sequence
  epitope
QVPLVQQQQ

SEQ ID NO: 1525 - protein, 9 aa, Artificial Sequence
  epitope
LVQQQQFLG

SEQ ID NO: 1526 - protein, 4 aa, Artificial Sequence
  epitope
VQQQ

SEQ ID NO: 1527 - protein, 9 aa, Artificial Sequence
  epitope
QVPLVQQQQ

SEQ ID NO: 1528 - protein, 7 aa, Artificial Sequence
  epitope
QVPLVQQ

SEQ ID NO: 1529 - protein, 7 aa, Artificial Sequence
  epitope
  misc_feature (2)..(3): Xaa can be any naturally occurring amino acid
QXXLVQQ

SEQ ID NO: 1530 - protein, 15 aa, Artificial Sequence
  epitope
  misc_feature (1)..(4): Xaa can be any naturally occurring amino acid
  misc_feature (11)..(11): Xaa can be any naturally occurring amino acid
XXXXVQQQQFXGQQQ

SEQ ID NO: 1531 - protein, 15 aa, Artificial Sequence
  epitope
  misc_feature (1)..(4): Xaa can be any naturally occurring amino acid
  misc_feature (9)..(12): Xaa can be any naturally occurring amino acid
XXXXVQQQXXXXQQQ

SEQ ID NO: 1532 - protein, 8 aa, Artificial Sequence
  epitope
QVPLVQQQ

SEQ ID NO: 1533 - protein, 8 aa, Artificial Sequence
  epitope
  misc_feature (1)..(4): Xaa can be any naturally occurring amino acid
XXXXVQQQ

SEQ ID NO: 1534 - protein, 7 aa, Artificial Sequence
  epitope
QQQQFLG

SEQ ID NO: 1535 - protein, 7 aa, Artificial Sequence
  epitope
  misc_feature (6)..(6): Xaa can be any naturally occurring amino acid
QQQQFXG

SEQ ID NO: 1536 - protein, 15 aa, Artificial Sequence
  epitope
  misc_feature (2)..(3): Xaa can be any naturally occurring amino acid
  misc_feature (8)..(11): Xaa can be any naturally occurring amino acid
  misc_feature (14)..(15): Xaa can be any naturally occurring amino acid
QXXLVQQXXXXGQXX

SEQ ID NO: 1537 - protein, 15 aa, Artificial Sequence
  epitope
  misc_feature (1)..(4): Xaa can be any naturally occurring amino acid
  misc_feature (8)..(11): Xaa can be any naturally occurring amino acid
  misc_feature (14)..(15): Xaa can be any naturally occurring amino acid
XXXXVQQXXXXGQXX

SEQ ID NO: 1538 - protein, 10 aa, Artificial Sequence
  epitope
LVQQQQFLGQ

SEQ ID NO: 1539 - protein, 9 aa, Artificial Sequence
  epitope
LVQQQQFLG

SEQ ID NO: 1540 - protein, 8 aa, Artificial Sequence
  epitope
VQQQQFLG

SEQ ID NO: 1541 - protein, 8 aa, Artificial Sequence
  epitope
  misc_feature (4)..(7): Xaa can be any naturally occurring amino acid
VQQXXXXG

SEQ ID NO: 1542 - protein, 9 aa, Artificial Sequence
  epitope
QVPLVQQQQ

SEQ ID NO: 1543 - protein, 7 aa, Artificial Sequence
  epitope
QVPLVQQ

SEQ ID NO: 1544 - protein, 7 aa, Artificial Sequence
  epitope
  misc_feature (2)..(4): Xaa can be any naturally occurring amino acid
QXXXVQQ

SEQ ID NO: 1545 - protein, 15 aa, Artificial Sequence
  epitope
  misc_feature (1)..(2): Xaa can be any naturally occurring amino acid
  misc_feature (6)..(6): Xaa can be any naturally occurring amino acid
  misc_feature (10)..(10): Xaa can be any naturally occurring amino acid
XXPLVXQQQXLGQQQ

SEQ ID NO: 1546 - protein, 15 aa, Artificial Sequence
  epitope
  misc_feature (1)..(6): Xaa can be any naturally occurring amino acid
  misc_feature (10)..(10): Xaa can be any naturally occurring amino acid
  misc_feature (15)..(15): Xaa can be any naturally occurring amino acid
XXXXXXQQQXLGQQX

SEQ ID NO: 1547 - protein, 9 aa, Artificial Sequence
  epitope
QVPLVQQQQ

SEQ ID NO: 1548 - protein, 8 aa, Artificial Sequence
  epitope
QVPLVQQQ

SEQ ID NO: 1549 - protein, 8 aa, Artificial Sequence
  epitope
  misc_feature (1)..(2): Xaa can be any naturally occurring amino acid
  misc_feature (6)..(6): Xaa can be any naturally occurring amino acid
XXPLVXQQ

SEQ ID NO: 1550 - protein, 10 aa, Artificial Sequence
  epitope
LVQQQQFLGQ

SEQ ID NO: 1551 - protein, 8 aa, Artificial Sequence
  epitope
QQQQFLGQ

SEQ ID NO: 1552 - protein, 8 aa, Artificial Sequence
  epitope
  misc_feature (1)..(1): Xaa can be any naturally occurring amino acid
  misc_feature (5)..(5): Xaa can be any naturally occurring amino acid
XQQQXLGQ

SEQ ID NO: 1553 - protein, 15 aa, Artificial Sequence
  epitope
  misc_feature (2)..(2): Xaa can be any naturally occurring amino acid
  misc_feature (8)..(8): Xaa can be any naturally occurring amino acid
QXPLVQQXQFLGQQQ

SEQ ID NO: 1554 - protein, 15 aa, Artificial Sequence
  epitope
  misc_feature (1)..(3): Xaa can be any naturally occurring amino acid
  misc_feature (8)..(11): Xaa can be any naturally occurring amino acid
XXXLVQQXXXXGQQQ

SEQ ID NO: 1555 - protein, 8 aa, Artificial Sequence
  epitope
QVPLVQQQ

SEQ ID NO: 1556 - protein, 5 aa, Artificial Sequence
  epitope
LVQQQ

SEQ ID NO: 1557 - protein, 10 aa, Artificial Sequence
  epitope
QVPLVQQQQF

SEQ ID NO: 1558 - protein, 8 aa, Artificial Sequence
  epitope
PLVQQQQF

SEQ ID NO: 1559 - protein, 9 aa, Artificial Sequence
  epitope
  misc_feature (1)..(1): Xaa can be any naturally occurring amino acid
  misc_feature (3)..(3): Xaa can be any naturally occurring amino acid
  misc_feature (5)..(6): Xaa can be any naturally occurring amino acid
  misc_feature (8)..(8): Xaa can be any naturally occurring amino acid
XPXVXXQXF

SEQ ID NO: 1560 - protein, 8 aa, Artificial Sequence
  epitope
QQQFLGQQ

SEQ ID NO: 1561 - protein, 15 aa, Artificial Sequence
  epitope
  misc_feature (1)..(1): Xaa can be any naturally occurring amino acid
XVPLVQQQQFLGQQQ

SEQ ID NO: 1562 - protein, 10 aa, Artificial Sequence
  epitope
QVPLVQQQQF

SEQ ID NO: 1563 - protein, 9 aa, Artificial Sequence
  epitope
QVPLVQQQQ

SEQ ID NO: 1564 - protein, 9 aa, Artificial Sequence
  epitope
  misc_feature (1)..(1): Xaa can be any naturally occurring amino acid
XVPLVQQQQ

SEQ ID NO: 1565 - protein, 8 aa, Artificial Sequence
  epitope
QQQQFLGQ

SEQ ID NO: 1566 - protein, 15 aa, Artificial Sequence
  epitope
PQQPQQPFPQTQQPQ

SEQ ID NO: 1567 - protein, 7 aa, Artificial Sequence
  epitope
PFPQTQQ

SEQ ID NO: 1568 - protein, 6 aa, Artificial Sequence
  epitope
PFPQTQ

SEQ ID NO: 1569 - protein, 15 aa, Artificial Sequence
  epitope
  misc_feature (1)..(9): Xaa can be any naturally occurring amino acid
  misc_feature (14)..(15): Xaa can be any naturally occurring amino acid
XXXXXXXXXQTQQXX

SEQ ID NO: 1570 - protein, 15 aa, Artificial Sequence
  epitope
  misc_feature (4)..(4): Xaa can be any naturally occurring amino acid
  misc_feature (14)..(14): Xaa can be any naturally occurring amino acid
PQQXQQPFPQTQQXQ

SEQ ID NO: 1571 - protein, 15 aa, Artificial Sequence
  epitope
  misc_feature (4)..(4): Xaa can be any naturally occurring amino acid
  misc_feature (13)..(15): Xaa can be any naturally occurring amino acid
PQQXQQPFPQTQXXX

SEQ ID NO: 1572 - protein, 15 aa, Artificial Sequence
  epitope
  misc_feature (4)..(4): Xaa can be any naturally occurring amino acid
  misc_feature (12)..(15): Xaa can be any naturally occurring amino acid
PQQXQQPFPQTXXXX

SEQ ID NO: 1573 - protein, 9 aa, Artificial Sequence
  epitope
PQQPQQPFP

SEQ ID NO: 1574 - protein, 9 aa, Artificial Sequence
  epitope
  misc_feature (4)..(4): Xaa can be any naturally occurring amino acid
PQQXQQPFP

SEQ ID NO: 1575 - protein, 5 aa, Artificial Sequence
  epitope
QQPQQ

SEQ ID NO: 1576 - protein, 5 aa, Artificial Sequence
  epitope
  misc_feature (3)..(3): Xaa can be any naturally occurring amino acid
QQXQQ

SEQ ID NO: 1577 - protein, 7 aa, Artificial Sequence
  epitope
PFPQTQQ

SEQ ID NO: 1578 - protein, 7 aa, Artificial Sequence
  epitope
  misc_feature (7)..(7): Xaa can be any naturally occurring amino acid
PFPQTQX

SEQ ID NO: 1579 - protein, 7 aa, Artificial Sequence
  epitope
  misc_feature (6)..(7): Xaa can be any naturally occurring amino acid
PFPQTXX

SEQ ID NO: 1580 - protein, 10 aa, Artificial Sequence
  epitope
QPFPQTQQPQ

SEQ ID NO: 1581 - protein, 9 aa, Artificial Sequence
  epitope
PFPQTQQPQ

SEQ ID NO: 1582 - protein, 8 aa, Artificial Sequence
  epitope
FPQTQQPQ

SEQ ID NO: 1583 - protein, 8 aa, Artificial Sequence
  epitope
  misc_feature (1)..(3): Xaa can be any naturally occurring amino acid
  misc_feature (7)..(7): Xaa can be any naturally occurring amino acid
XXXTQQXQ

SEQ ID NO: 1584 - protein, 15 aa, Artificial Sequence
  epitope
  misc_feature (1)..(9): Xaa can be any naturally occurring amino acid
XXXXXXXXXQTQQPQ

SEQ ID NO: 1585 - protein, 15 aa, Artificial Sequence
  epitope
  misc_feature (1)..(9): Xaa can be any naturally occurring amino acid
  misc_feature (14)..(14): Xaa can be any naturally occurring amino acid
XXXXXXXXXQTQQXQ

SEQ ID NO: 1586 - protein, 10 aa, Artificial Sequence
  epitope
QQPFPQTQQP

SEQ ID NO: 1587 - protein, 10 aa, Artificial Sequence
  epitope
  misc_feature (1)..(5): Xaa can be any naturally occurring amino acid
XXXXXQTQQP

SEQ ID NO: 1588 - protein, 10 aa, Artificial Sequence
  epitope
  misc_feature (1)..(5): Xaa can be any naturally occurring amino acid
  misc_feature (10)..(10): Xaa can be any naturally occurring amino acid
XXXXXQTQQX

SEQ ID NO: 1589 - protein, 15 aa, Artificial Sequence
  epitope
  misc_feature (1)..(5): Xaa can be any naturally occurring amino acid
  misc_feature (9)..(14): Xaa can be any naturally occurring amino acid
XXXXXQPFXXXXXXQ

SEQ ID NO: 1590 - protein, 10 aa, Artificial Sequence
  epitope
QPFPQTQQPQ

SEQ ID NO: 1591 - protein, 9 aa, Artificial Sequence
  epitope
QPFPQTQQP

SEQ ID NO: 1592 - protein, 15 aa, Artificial Sequence
  epitope
  misc_feature (1)..(2): Xaa can be any naturally occurring amino acid
  misc_feature (5)..(5): Xaa can be any naturally occurring amino acid
XXQPXQPFPQTQQPQ

SEQ ID NO: 1593 - protein, 8 aa, Artificial Sequence
  epitope
QPQQPFPQ

SEQ ID NO: 1594 - protein, 7 aa, Artificial Sequence
  epitope
QPQQPFP

SEQ ID NO: 1595 - protein, 6 aa, Artificial Sequence
  epitope
QPQQPF

SEQ ID NO: 1596 - protein, 6 aa, Artificial Sequence
  epitope
  misc_feature (3)..(3): Xaa can be any naturally occurring amino acid
QPXQPF

SEQ ID NO: 1597 - protein, 6 aa, Artificial Sequence
  epitope
  misc_feature (2)..(3): Xaa can be any naturally occurring amino acid
QXXQPF

SEQ ID NO: 1598 - protein, 15 aa, Artificial Sequence
  epitope
PQQPAQLEAIRSLVL

SEQ ID NO: 1599 - protein, 15 aa, Artificial Sequence
  epitope
  misc_feature (3)..(4): Xaa can be any naturally occurring amino acid
  misc_feature (8)..(9): Xaa can be any naturally occurring amino acid
  misc_feature (13)..(13): Xaa can be any naturally occurring amino acid
PQXXAQLXXIRSXVL

SEQ ID NO: 1600 - protein, 15 aa, Artificial Sequence
  epitope
  misc_feature (1)..(4): Xaa can be any naturally occurring amino acid
  misc_feature (8)..(9): Xaa can be any naturally occurring amino acid
  misc_feature (13)..(13): Xaa can be any naturally occurring amino acid
XXXXAQLXXIRSXVL

SEQ ID NO: 1601 - protein, 9 aa, Artificial Sequence
  epitope
AQLEAIRSL

SEQ ID NO: 1602 - protein, 9 aa, Artificial Sequence
  epitope
  misc_feature (4)..(5): Xaa can be any naturally occurring amino acid
  misc_feature (9)..(9): Xaa can be any naturally occurring amino acid
AQLXXIRSX

SEQ ID NO: 1603 - protein, 15 aa, Artificial Sequence
  epitope
  misc_feature (1)..(1): Xaa can be any naturally occurring amino acid
  misc_feature (8)..(8): Xaa can be any naturally occurring amino acid
XQQPAQLXAIRSLVL

SEQ ID NO: 1604 - protein, 15 aa, Artificial Sequence
  epitope
  misc_feature (1)..(1): Xaa can be any naturally occurring amino acid
  misc_feature (8)..(9): Xaa can be any naturally occurring amino acid
  misc_feature (13)..(13): Xaa can be any naturally occurring amino acid
  misc_feature (15)..(15): Xaa can be any naturally occurring amino acid
XQQPAQLXXIRSXVX

SEQ ID NO: 1605 - protein, 8 aa, Artificial Sequence
  epitope
AQLEAIRS

SEQ ID NO: 1606 - protein, 8 aa, Artificial Sequence
  epitope
  misc_feature (4)..(4): Xaa can be any naturally occurring amino acid
AQLXAIRS

SEQ ID NO: 1607 - protein, 8 aa, Artificial Sequence
  epitope
  misc_feature (4)..(5): Xaa can be any naturally occurring amino acid
AQLXXIRS

SEQ ID NO: 1608 - protein, 15 aa, Artificial Sequence
  epitope
VGYNPDKVPFVPISG

SEQ ID NO: 1609 - protein, 15 aa, Artificial Sequence
  epitope
  misc_feature (1)..(1): Xaa can be any naturally occurring amino acid
  misc_feature (4)..(5): Xaa can be any naturally occurring amino acid
  misc_feature (10)..(11): Xaa can be any naturally occurring amino acid
  misc_feature (13)..(15): Xaa can be any naturally occurring amino acid
XGYXXDKVPXXPXXX

SEQ ID NO: 1610 - protein, 15 aa, Artificial Sequence
  epitope
  misc_feature (1)..(1): Xaa can be any naturally occurring amino acid
  misc_feature (4)..(5): Xaa can be any naturally occurring amino acid
  misc_feature (8)..(15): Xaa can be any naturally occurring amino acid
XGYXXDKXXXXXXXX

SEQ ID NO: 1611 - protein, 4 aa, Artificial Sequence
  epitope
YNPD

SEQ ID NO: 1612 - protein, 15 aa, Artificial Sequence
  epitope
  misc_feature (1)..(1): Xaa can be any naturally occurring amino acid
  misc_feature (4)..(4): Xaa can be any naturally occurring amino acid
  misc_feature (9)..(15): Xaa can be any naturally occurring amino acid
XGYXPDKVXXXXXXX

SEQ ID NO: 1613 - protein, 4 aa, Artificial Sequence
  epitope
YNPD

SEQ ID NO: 1614 - protein, 4 aa, Artificial Sequence
  epitope
YNPD

SEQ ID NO: 1615 - protein, 4 aa, Artificial Sequence
  epitope
YNPD

SEQ ID NO: 1616 - protein, 6 aa, Artificial Sequence
  epitope
FVPISG

SEQ ID NO: 1617 - protein, 8 aa, Artificial Sequence
  epitope
VPFVPISG

SEQ ID NO: 1618 - protein, 6 aa, Artificial Sequence
  epitope
FVPISG

SEQ ID NO: 1619 - protein, 6 aa, Artificial Sequence
  epitope
FVPISG

SEQ ID NO: 1620 - protein, 6 aa, Artificial Sequence
  epitope
YNPDKV

SEQ ID NO: 1621 - protein, 4 aa, Artificial Sequence
  epitope
YNPD

SEQ ID NO: 1622 - protein, 15 aa, Artificial Sequence
  epitope
  misc_feature (4)..(6): Xaa can be any naturally occurring amino acid
  misc_feature (8)..(15): Xaa can be any naturally occurring amino acid
VGYXXXKXXXXXXXX

SEQ ID NO: 1623 - protein, 4 aa, Artificial Sequence
  epitope
YNPD

SEQ ID NO: 1624 - protein, 6 aa, Artificial Sequence
  epitope
FVPISG

SEQ ID NO: 1625 - protein, 15 aa, Artificial Sequence
  epitope
  misc_feature (1)..(1): Xaa can be any naturally occurring amino acid
  misc_feature (4)..(6): Xaa can be any naturally occurring amino acid
  misc_feature (9)..(15): Xaa can be any naturally occurring amino acid
XGYXXXKVXXXXXXX

SEQ ID NO: 1626 - protein, 4 aa, Artificial Sequence
  epitope
YNPD

SEQ ID NO: 1627 - protein, 15 aa, Artificial Sequence
  epitope
  misc_feature (1)..(1): Xaa can be any naturally occurring amino acid
  misc_feature (4)..(5): Xaa can be any naturally occurring amino acid
  misc_feature (8)..(15): Xaa can be any naturally occurring amino acid
XGYXXDKXXXXXXXX

SEQ ID NO: 1628 - protein, 7 aa, Artificial Sequence
  epitope
YNPDKVP

SEQ ID NO: 1629 - protein, 4 aa, Artificial Sequence
  epitope
YNPD

SEQ ID NO: 1630 - protein, 10 aa, Artificial Sequence
  epitope
PDKVPFVPIS

SEQ ID NO: 1631 - protein, 10 aa, Artificial Sequence
  epitope
DKVPFVPISG

SEQ ID NO: 1632 - protein, 4 aa, Artificial Sequence
  epitope
YNPD

SEQ ID NO: 1633 - protein, 4 aa, Artificial Sequence
  epitope
YNPD

SEQ ID NO: 1634 - protein, 8 aa, Artificial Sequence
  epitope
YNPDKVPF

SEQ ID NO: 1635 - protein, 4 aa, Artificial Sequence
  epitope
YNPD

SEQ ID NO: 1636 - protein, 15 aa, Artificial Sequence
  epitope
  misc_feature (1)..(1): Xaa can be any naturally occurring amino acid
  misc_feature (4)..(6): Xaa can be any naturally occurring amino acid
  misc_feature (9)..(9): Xaa can be any naturally occurring amino acid
  misc_feature (11)..(11): Xaa can be any naturally occurring amino acid
  misc_feature (13)..(15): Xaa can be any naturally occurring amino acid
XGYXXXKVXFXPXXX

SEQ ID NO: 1637 - protein, 8 aa, Artificial Sequence
  epitope
YNPDKVPF

SEQ ID NO: 1638 - protein, 15 aa, Artificial Sequence
  epitope
  misc_feature (1)..(2): Xaa can be any naturally occurring amino acid
  misc_feature (4)..(5): Xaa can be any naturally occurring amino acid
  misc_feature (9)..(15): Xaa can be any naturally occurring amino acid
XXYXXDKVXXXXXXX

SEQ ID NO: 1639 - protein, 6 aa, Artificial Sequence
  epitope
YNPDKV

SEQ ID NO: 1640 - protein, 10 aa, Artificial Sequence
  epitope
DKVPFVPISG

SEQ ID NO: 1641 - protein, 7 aa, Artificial Sequence
  epitope
YNPDKVP

SEQ ID NO: 1642 - protein, 4 aa, Artificial Sequence
  epitope
YNPD

SEQ ID NO: 1643 - protein, 10 aa, Artificial Sequence
  epitope
PDKVPFVPIS

SEQ ID NO: 1644 - protein, 15 aa, Artificial Sequence
  epitope
  misc_feature (1)..(2): Xaa can be any naturally occurring amino acid
  misc_feature (4)..(6): Xaa can be any naturally occurring amino acid
  misc_feature (9)..(12): Xaa can be any naturally occurring amino acid
  misc_feature (14)..(15): Xaa can be any naturally occurring amino acid
XXYXXXKVXXXXIXX

SEQ ID NO: 1645 - protein, 9 aa, Artificial Sequence
  epitope
YNPDKVPFV

SEQ ID NO: 1646 - protein, 8 aa, Artificial Sequence
  epitope
YNPDKVPF

SEQ ID NO: 1647 - protein, 4 aa, Artificial Sequence
  epitope
YNPD

SEQ ID NO: 1648 - protein, 6 aa, Artificial Sequence
  epitope
FVPISG

SEQ ID NO: 1649 - protein, 15 aa, Artificial Sequence
  epitope
  misc_feature (1)..(1): Xaa can be any naturally occurring amino acid
  misc_feature (4)..(6): Xaa can be any naturally occurring amino acid
  misc_feature (9)..(15): Xaa can be any naturally occurring amino acid
XGYXXXKVXXXXXXX

SEQ ID NO: 1650 - protein, 8 aa, Artificial Sequence
  epitope
YNPDKVPF

SEQ ID NO: 1651 - protein, 6 aa, Artificial Sequence
  epitope
NPDKVP

SEQ ID NO: 1652 - protein, 15 aa, Artificial Sequence
  epitope
  misc_feature (1)..(1): Xaa can be any naturally occurring amino acid
  misc_feature (4)..(5): Xaa can be any naturally occurring amino acid
  misc_feature (7)..(7): Xaa can be any naturally occurring amino acid
  misc_feature (9)..(10): Xaa can be any naturally occurring amino acid
  misc_feature (12)..(12): Xaa can be any naturally occurring amino acid
  misc_feature (14)..(15): Xaa can be any naturally occurring amino acid
XGYXXDXVXXVXIXX

SEQ ID NO: 1653 - protein, 9 aa, Artificial Sequence
  epitope
YNPDKVPFV

SEQ ID NO: 1654 - protein, 8 aa, Artificial Sequence
  epitope
YNPDKVPF

SEQ ID NO: 1655 - protein, 6 aa, Artificial Sequence
  epitope
FVPISG

SEQ ID NO: 1656 - protein, 8 aa, Artificial Sequence
  epitope
NPDKVPFV

SEQ ID NO: 1657 - protein, 8 aa, Artificial Sequence
  epitope
VPFVPISG

SEQ ID NO: 1658 - protein, 9 aa, Artificial Sequence
  epitope
KVPFVPISG

SEQ ID NO: 1659 - protein, 8 aa, Artificial Sequence
  epitope
YNPDKVPF

SEQ ID NO: 1660 - protein, 5 aa, Artificial Sequence
  epitope
YNPDK

SEQ ID NO: 1661 - protein, 6 aa, Artificial Sequence
  epitope
FVPISG

SEQ ID NO: 1662 - protein, 15 aa, Artificial Sequence
  epitope
  misc_feature (1)..(2): Xaa can be any naturally occurring amino acid
  misc_feature (4)..(5): Xaa can be any naturally occurring amino acid
  misc_feature (9)..(11): Xaa can be any naturally occurring amino acid
  misc_feature (13)..(15): Xaa can be any naturally occurring amino acid
XXYXXDKVXXXPXXX

SEQ ID NO: 1663 - protein, 9 aa, Artificial Sequence
  epitope
YNPDKVPFV

SEQ ID NO: 1664 - protein, 8 aa, Artificial Sequence
  epitope
YNPDKVPF

SEQ ID NO: 1665 - protein, 8 aa, Artificial Sequence
  epitope
VPFVPISG

SEQ ID NO: 1666 - protein, 7 aa, Artificial Sequence
  epitope
YNPDKVP

SEQ ID NO: 1667 - protein, 6 aa, Artificial Sequence
  epitope
NPDKVP

SEQ ID NO: 1668 - protein, 6 aa, Artificial Sequence
  epitope
FVPISG

SEQ ID NO: 1669 - protein, 10 aa, Artificial Sequence
  epitope
GYNPDKVPFV

SEQ ID NO: 1670 - protein, 9 aa, Artificial Sequence
  epitope
YNPDKVPFV

SEQ ID NO: 1671 - protein, 8 aa, Artificial Sequence
  epitope
YNPDKVPF

SEQ ID NO: 1672 - protein, 10 aa, Artificial Sequence
  epitope
PDKVPFVPIS

SEQ ID NO: 1673 - protein, 15 aa, Artificial Sequence
  epitope
  misc_feature (1)..(1): Xaa can be any naturally occurring amino acid
  misc_feature (4)..(5): Xaa can be any naturally occurring amino acid
  misc_feature (9)..(10): Xaa can be any naturally occurring amino acid
  misc_feature (13)..(14): Xaa can be any naturally occurring amino acid
XGYXXDKVXXVPXXG

SEQ ID NO: 1674 - protein, 15 aa, Artificial Sequence
  epitope
  misc_feature (1)..(5): Xaa can be any naturally occurring amino acid
  misc_feature (9)..(10): Xaa can be any naturally occurring amino acid
  misc_feature (13)..(14): Xaa can be any naturally occurring amino acid
XXXXXDKVXXVPXXG

SEQ ID NO: 1675 - protein, 15 aa, Artificial Sequence
  epitope
  misc_feature (1)..(5): Xaa can be any naturally occurring amino acid
  misc_feature (9)..(10): Xaa can be any naturally occurring amino acid
  misc_feature (13)..(15): Xaa can be any naturally occurring amino acid
XXXXXDKVXXVPXXX

SEQ ID NO: 1676 - protein, 9 aa, Artificial Sequence
  epitope
KVPFVPISG

SEQ ID NO: 1677 - protein, 7 aa, Artificial Sequence
  epitope
PFVPISG

SEQ ID NO: 1678 - protein, 15 aa, Artificial Sequence
  epitope
  misc_feature (1)..(2): Xaa can be any naturally occurring amino acid
  misc_feature (4)..(5): Xaa can be any naturally occurring amino acid
  misc_feature (10)..(11): Xaa can be any naturally occurring amino acid
  misc_feature (14)..(14): Xaa can be any naturally occurring amino acid
XXYXXDKVPXXPIXG

SEQ ID NO: 1679 - protein, 15 aa, Artificial Sequence
  epitope
  misc_feature (1)..(2): Xaa can be any naturally occurring amino acid
  misc_feature (4)..(5): Xaa can be any naturally occurring amino acid
  misc_feature (9)..(12): Xaa can be any naturally occurring amino acid
  misc_feature (14)..(15): Xaa can be any naturally occurring amino acid
XXYXXDKVXXXXIXX

SEQ ID NO: 1680 - protein, 8 aa, Artificial Sequence
  epitope
YNPDKVPF

SEQ ID NO: 1681 - protein, 5 aa, Artificial Sequence
  epitope
DKVPF

SEQ ID NO: 1682 - protein, 5 aa, Artificial Sequence
  epitope
  misc_feature (5)..(5): Xaa can be any naturally occurring amino acid
DKVPX

SEQ ID NO: 1683 - protein, 8 aa, Artificial Sequence
  epitope
YNPDKVPF

SEQ ID NO: 1684 - protein, 6 aa, Artificial Sequence
  epitope
FVPISG

SEQ ID NO: 1685 - protein, 15 aa, Artificial Sequence
  epitope
PAKEAANFTSQVIIM

SEQ ID NO: 1686 - protein, 15 aa, Artificial Sequence
  epitope
  misc_feature (2)..(2): Xaa can be any naturally occurring amino acid
  misc_feature (4)..(5): Xaa can be any naturally occurring amino acid
  misc_feature (8)..(15): Xaa can be any naturally occurring amino acid
PXKXXANXXXXXXXX

SEQ ID NO: 1687 - protein, 6 aa, Artificial Sequence
  epitope
EAANFT

SEQ ID NO: 1688 - protein, 4 aa, Artificial Sequence
  epitope
KEAA

SEQ ID NO: 1689 - protein, 6 aa, Artificial Sequence
  epitope
SQVIIM

SEQ ID NO: 1690 - protein, 6 aa, Artificial Sequence
  epitope
EAANFT

SEQ ID NO: 1691 - protein, 15 aa, Artificial Sequence
  epitope
  misc_feature (2)..(2): Xaa can be any naturally occurring amino acid
  misc_feature (4)..(4): Xaa can be any naturally occurring amino acid
  misc_feature (8)..(10): Xaa can be any naturally occurring amino acid
  misc_feature (12)..(14): Xaa can be any naturally occurring amino acid
PXKXAANXXXQXXXM

SEQ ID NO: 1692 - protein, 15 aa, Artificial Sequence
  epitope
  misc_feature (2)..(2): Xaa can be any naturally occurring amino acid
  misc_feature (4)..(4): Xaa can be any naturally occurring amino acid
  misc_feature (7)..(14): Xaa can be any naturally occurring amino acid
PXKXAAXXXXXXXXM

SEQ ID NO: 1693 - protein, 8 aa, Artificial Sequence
  epitope
KEAANFTS

SEQ ID NO: 1694 - protein, 7 aa, Artificial Sequence
  epitope
EAANFTS

SEQ ID NO: 1695 - protein, 6 aa, Artificial Sequence
  epitope
EAANFT

SEQ ID NO: 1696 - protein, 15 aa, Artificial Sequence
  epitope
  misc_feature (2)..(2): Xaa can be any naturally occurring amino acid
  misc_feature (4)..(5): Xaa can be any naturally occurring amino acid
  misc_feature (10)..(14): Xaa can be any naturally occurring amino acid
PXKXXANFTXXXXXM

SEQ ID NO: 1697 - protein, 15 aa, Artificial Sequence
  epitope
  misc_feature (1)..(2): Xaa can be any naturally occurring amino acid
  misc_feature (4)..(5): Xaa can be any naturally occurring amino acid
  misc_feature (10)..(15): Xaa can be any naturally occurring amino acid
XXKXXANFTXXXXXX

SEQ ID NO: 1698 - protein, 7 aa, Artificial Sequence
  epitope
KEAANFT

SEQ ID NO: 1699 - protein, 6 aa, Artificial Sequence
  epitope
EAANFT

SEQ ID NO: 1700 - protein, 6 aa, Artificial Sequence
  epitope
  misc_feature (1)..(2): Xaa can be any naturally occurring amino acid
XXANFT

SEQ ID NO: 1701 - protein, 6 aa, Artificial Sequence
  epitope
EAANFT

SEQ ID NO: 1702 - protein, 6 aa, Artificial Sequence
  epitope
SQVIIM

SEQ ID NO: 1703 - protein, 6 aa, Artificial Sequence
  epitope
EAANFT

SEQ ID NO: 1704 - protein, 6 aa, Artificial Sequence
  epitope
EAANFT

SEQ ID NO: 1705 - protein, 15 aa, Artificial Sequence
  epitope
  misc_feature (2)..(2): Xaa can be any naturally occurring amino acid
  misc_feature (7)..(14): Xaa can be any naturally occurring amino acid
PXKEAAXXXXXXXXM

SEQ ID NO: 1706 - protein, 6 aa, Artificial Sequence
  epitope
EAANFT

SEQ ID NO: 1707 - protein, 6 aa, Artificial Sequence
  epitope
SQVIIM

SEQ ID NO: 1708 - protein, 15 aa, Artificial Sequence
  epitope
  misc_feature (2)..(2): Xaa can be any naturally occurring amino acid
  misc_feature (9)..(9): Xaa can be any naturally occurring amino acid
  misc_feature (11)..(15): Xaa can be any naturally occurring amino acid
PXKEAANFXSXXXXX

SEQ ID NO: 1709 - protein, 15 aa, Artificial Sequence
  epitope
  misc_feature (1)..(2): Xaa can be any naturally occurring amino acid
  misc_feature (7)..(15): Xaa can be any naturally occurring amino acid
XXKEAAXXXXXXXXX

SEQ ID NO: 1710 - protein, 8 aa, Artificial Sequence
  epitope
KEAANFTS

SEQ ID NO: 1711 - protein, 7 aa, Artificial Sequence
  epitope
KEAANFT

SEQ ID NO: 1712 - protein, 5 aa, Artificial Sequence
  epitope
EAANF

SEQ ID NO: 1713 - protein, 15 aa, Artificial Sequence
  epitope
  misc_feature (2)..(2): Xaa can be any naturally occurring amino acid
  misc_feature (4)..(6): Xaa can be any naturally occurring amino acid
  misc_feature (8)..(9): Xaa can be any naturally occurring amino acid
  misc_feature (11)..(15): Xaa can be any naturally occurring amino acid
PXKXXXNXXSXXXXX

SEQ ID NO: 1714 - protein, 6 aa, Artificial Sequence
  epitope
KEAANF

SEQ ID NO: 1715 - protein, 4 aa, Artificial Sequence
  epitope
KEAA

SEQ ID NO: 1716 - protein, 6 aa, Artificial Sequence
  epitope
SQVIIM

SEQ ID NO: 1717 - protein, 15 aa, Artificial Sequence
  epitope
  misc_feature (1)..(2): Xaa can be any naturally occurring amino acid
  misc_feature (8)..(14): Xaa can be any naturally occurring amino acid
XXKEAANXXXXXXXM

SEQ ID NO: 1718 - protein, 6 aa, Artificial Sequence
  epitope
EAANFT

SEQ ID NO: 1719 - protein, 5 aa, Artificial Sequence
  epitope
EAANF

SEQ ID NO: 1720 - protein, 5 aa, Artificial Sequence
  epitope
  misc_feature (5)..(5): Xaa can be any naturally occurring amino acid
EAANX

SEQ ID NO: 1721 - protein, 15 aa, Artificial Sequence
  epitope
  misc_feature (2)..(2): Xaa can be any naturally occurring amino acid
  misc_feature (4)..(4): Xaa can be any naturally occurring amino acid
  misc_feature (6)..(9): Xaa can be any naturally occurring amino acid
  misc_feature (11)..(15): Xaa can be any naturally occurring amino acid
PXKXAXXXXSXXXXX

SEQ ID NO: 1722 - protein, 7 aa, Artificial Sequence
  epitope
KEAANFT

SEQ ID NO: 1723 - protein, 6 aa, Artificial Sequence
  epitope
KEAANF

SEQ ID NO: 1724 - protein, 15 aa, Artificial Sequence
  epitope
  misc_feature (5)..(5): Xaa can be any naturally occurring amino acid
  misc_feature (7)..(11): Xaa can be any naturally occurring amino acid
  misc_feature (13)..(15): Xaa can be any naturally occurring amino acid
PAKEXAXXXXXVXXX

SEQ ID NO: 1725 - protein, 15 aa, Artificial Sequence
  epitope
  misc_feature (2)..(2): Xaa can be any naturally occurring amino acid
  misc_feature (5)..(5): Xaa can be any naturally occurring amino acid
  misc_feature (7)..(15): Xaa can be any naturally occurring amino acid
PXKEXAXXXXXXXXX

SEQ ID NO: 1726 - protein, 8 aa, Artificial Sequence
  epitope
KEAANFTS

SEQ ID NO: 1727 - protein, 6 aa, Artificial Sequence
  epitope
KEAANF

SEQ ID NO: 1728 - protein, 6 aa, Artificial Sequence
  epitope
KEAANF

SEQ ID NO: 1729 - protein, 10 aa, Artificial Sequence
  epitope
ANFTSQVIIM

SEQ ID NO: 1730 - protein, 6 aa, Artificial Sequence
  epitope
SQVIIM

SEQ ID NO: 1731 - protein, 15 aa, Artificial Sequence
  epitope
  misc_feature (2)..(2): Xaa can be any naturally occurring amino acid
  misc_feature (6)..(15): Xaa can be any naturally occurring amino acid
PXKEAXXXXXXXXXX

SEQ ID NO: 1732 - protein, 4 aa, Artificial Sequence
  epitope
KEAA

SEQ ID NO: 1733 - protein, 15 aa, Artificial Sequence
  epitope
  misc_feature (1)..(2): Xaa can be any naturally occurring amino acid
  misc_feature (4)..(5): Xaa can be any naturally occurring amino acid
  misc_feature (7)..(8): Xaa can be any naturally occurring amino acid
  misc_feature (11)..(15): Xaa can be any naturally occurring amino acid
XXKXXAXXTSXXXXX

SEQ ID NO: 1734 - protein, 7 aa, Artificial Sequence
  epitope
KEAANFT

SEQ ID NO: 1735 - protein, 6 aa, Artificial Sequence
  epitope
EAANFT

SEQ ID NO: 1736 - protein, 15 aa, Artificial Sequence
  epitope
  misc_feature (1)..(2): Xaa can be any naturally occurring amino acid
  misc_feature (7)..(14): Xaa can be any naturally occurring amino acid
XXKEAAXXXXXXXXM

SEQ ID NO: 1737 - protein, 7 aa, Artificial Sequence
  epitope
KEAANFT

SEQ ID NO: 1738 - protein, 5 aa, Artificial Sequence
  epitope
EAANF

SEQ ID NO: 1739 - protein, 7 aa, Artificial Sequence
  epitope
KEAANFT

SEQ ID NO: 1740 - protein, 6 aa, Artificial Sequence
  epitope
KEAANF

SEQ ID NO: 1741 - protein, 6 aa, Artificial Sequence
  epitope
SQVIIM

SEQ ID NO: 1742 - protein, 5 aa, Artificial Sequence
  epitope
KEAAN

SEQ ID NO: 1743 - protein, 4 aa, Artificial Sequence
  epitope
EAAN

SEQ ID NO: 1744 - protein, 15 aa, Artificial Sequence
  epitope
  misc_feature (7)..(15): Xaa can be any naturally occurring amino acid
PAKEAAXXXXXXXXX

SEQ ID NO: 1745 - protein, 15 aa, Artificial Sequence
  epitope
  misc_feature (2)..(2): Xaa can be any naturally occurring amino acid
  misc_feature (4)..(4): Xaa can be any naturally occurring amino acid
  misc_feature (7)..(15): Xaa can be any naturally occurring amino acid
PXKXAAXXXXXXXXX

SEQ ID NO: 1746 - protein, 7 aa, Artificial Sequence
  epitope
EAANFTS

SEQ ID NO: 1747 - protein, 6 aa, Artificial Sequence
  epitope
EAANFT

SEQ ID NO: 1748 - protein, 15 aa, Artificial Sequence
  epitope
  misc_feature (2)..(2): Xaa can be any naturally occurring amino acid
  misc_feature (4)..(5): Xaa can be any naturally occurring amino acid
  misc_feature (7)..(9): Xaa can be any naturally occurring amino acid
  misc_feature (11)..(12): Xaa can be any naturally occurring amino acid
  misc_feature (14)..(15): Xaa can be any naturally occurring amino acid
PXKXXAXXXSXXIXX

SEQ ID NO: 1749 - protein, 6 aa, Artificial Sequence
  epitope
EAANFT

SEQ ID NO: 1750 - protein, 7 aa, Artificial Sequence
  epitope
KEAANFT

SEQ ID NO: 1751 - protein, 6 aa, Artificial Sequence
  epitope
SQVIIM

SEQ ID NO: 1752 - protein, 10 aa, Artificial Sequence
  epitope
ANFTSQVIIM

SEQ ID NO: 1753 - protein, 15 aa, Artificial Sequence
  epitope
VKEVSSYLKKVGYNP

SEQ ID NO: 1754 - protein, 15 aa, Artificial Sequence
  epitope
  misc_feature (1)..(5): Xaa can be any naturally occurring amino acid
  misc_feature (12)..(15): Xaa can be any naturally occurring amino acid
XXXXXSYLKKVXXXX

SEQ ID NO: 1755 - protein, 4 aa, Artificial Sequence
  epitope
YLKK

SEQ ID NO: 1756 - protein, 7 aa, Artificial Sequence
  epitope
VSSYLKK

SEQ ID NO: 1757 - protein, 6 aa, Artificial Sequence
  epitope
KVGYNP

SEQ ID NO: 1758 - protein, 4 aa, Artificial Sequence
  epitope
YLKK

SEQ ID NO: 1759 - protein, 4 aa, Artificial Sequence
  epitope
YLKK

SEQ ID NO: 1760 - protein, 9 aa, Artificial Sequence
  epitope
EVSSYLKKV

SEQ ID NO: 1761 - protein, 8 aa, Artificial Sequence
  epitope
YLKKVGYN

SEQ ID NO: 1762 - protein, 9 aa, Artificial Sequence
  epitope
KEVSSYLKK

SEQ ID NO: 1763 - protein, 7 aa, Artificial Sequence
  epitope
LKKVGYN

SEQ ID NO: 1764 - protein, 10 aa, Artificial Sequence
  epitope
KEVSSYLKKV

SEQ ID NO: 1765 - protein, 8 aa, Artificial Sequence
  epitope
YLKKVGYN

SEQ ID NO: 1766 - protein, 15 aa, Artificial Sequence
  epitope
  misc_feature (1)..(3): Xaa can be any naturally occurring amino acid
  misc_feature (6)..(6): Xaa can be any naturally occurring amino acid
  misc_feature (8)..(10): Xaa can be any naturally occurring amino acid
  misc_feature (13)..(15): Xaa can be any naturally occurring amino acid
XXXVSXYXXXVGXXX

SEQ ID NO: 1767 - protein, 7 aa, Artificial Sequence
  epitope
KKVGYNP

SEQ ID NO: 1768 - protein, 7 aa, Artificial Sequence
  epitope
VSSYLKK

SEQ ID NO: 1769 - protein, 6 aa, Artificial Sequence
  epitope
KVGYNP

SEQ ID NO: 1770 - protein, 7 aa, Artificial Sequence
  epitope
VSSYLKK

SEQ ID NO: 1771 - protein, 6 aa, Artificial Sequence
  epitope
KVGYNP

SEQ ID NO: 1772 - protein, 15 aa, Artificial Sequence
  epitope
  misc_feature (1)..(2): Xaa can be any naturally occurring amino acid
  misc_feature (4)..(6): Xaa can be any naturally occurring amino acid
  misc_feature (9)..(10): Xaa can be any naturally occurring amino acid
  misc_feature (12)..(15): Xaa can be any naturally occurring amino acid
XXEXXXYLXXVXXXX

SEQ ID NO: 1773 - protein, 8 aa, Artificial Sequence
  epitope
EVSSYLKK

SEQ ID NO: 1774 - protein, 9 aa, Artificial Sequence
  epitope
YLKKVGYNP

SEQ ID NO: 1775 - protein, 7 aa, Artificial Sequence
  epitope
LKKVGYN

SEQ ID NO: 1776 - protein, 15 aa, Artificial Sequence
  epitope
  misc_feature (1)..(2): Xaa can be any naturally occurring amino acid
  misc_feature (5)..(5): Xaa can be any naturally occurring amino acid
  misc_feature (8)..(8): Xaa can be any naturally occurring amino acid
  misc_feature (10)..(10): Xaa can be any naturally occurring amino acid
  misc_feature (12)..(15): Xaa can be any naturally occurring amino acid
XXEVXSYXKXVXXXX

SEQ ID NO: 1777 - protein, 9 aa, Artificial Sequence
  epitope
KEVSSYLKK

SEQ ID NO: 1778 - protein, 4 aa, Artificial Sequence
  epitope
KVGY

SEQ ID NO: 1779 - protein, 15 aa, Artificial Sequence
  epitope
  misc_feature (1)..(3): Xaa can be any naturally occurring amino acid
  misc_feature (9)..(10): Xaa can be any naturally occurring amino acid
  misc_feature (12)..(14): Xaa can be any naturally occurring amino acid
XXXVSSYLXXVXXXP

SEQ ID NO: 1780 - protein, 6 aa, Artificial Sequence
  epitope
YLKKVG

SEQ ID NO: 1781 - protein, 10 aa, Artificial Sequence
  epitope
KEVSSYLKKV

SEQ ID NO: 1782 - protein, 10 aa, Artificial Sequence
  epitope
VSSYLKKVGY

SEQ ID NO: 1783 - protein, 6 aa, Artificial Sequence
  epitope
KVGYNP

SEQ ID NO: 1784 - protein, 8 aa, Artificial Sequence
  epitope
LKKVGYNP

SEQ ID NO: 1785 - protein, 8 aa, Artificial Sequence
  epitope
LKKVGYNP

SEQ ID NO: 1786 - protein, 9 aa, Artificial Sequence
  epitope
KEVSSYLKK

SEQ ID NO: 1787 - protein, 8 aa, Artificial Sequence
  epitope
KEVSSYLK

SEQ ID NO: 1788 - protein, 8 aa, Artificial Sequence
  epitope
LKKVGYNP

SEQ ID NO: 1789 - protein, 15 aa, Artificial Sequence
  epitope
SGKELEALPKFLKNG

SEQ ID NO: 1790 - protein, 6 aa, Artificial Sequence
  epitope
SGKELE

SEQ ID NO: 1791 - protein, 4 aa, Artificial Sequence
  epitope
PKFL

SEQ ID NO: 1792 - protein, 6 aa, Artificial Sequence
  epitope
SGKELE

SEQ ID NO: 1793 - protein, 10 aa, Artificial Sequence
  epitope
SGKELEALPK

SEQ ID NO: 1794 - protein, 15 aa, Artificial Sequence
  epitope
  misc_feature (1)..(2): Xaa can be any naturally occurring amino acid
  misc_feature (4)..(4): Xaa can be any naturally occurring amino acid
  misc_feature (7)..(8): Xaa can be any naturally occurring amino acid
  misc_feature (10)..(10): Xaa can be any naturally occurring amino acid
  misc_feature (15)..(15): Xaa can be any naturally occurring amino acid
XXKXLEXXPXFLKNX

SEQ ID NO: 1795 - protein, 15 aa, Artificial Sequence
  epitope
  misc_feature (1)..(5): Xaa can be any naturally occurring amino acid
  misc_feature (7)..(10): Xaa can be any naturally occurring amino acid
  misc_feature (14)..(15): Xaa can be any naturally occurring amino acid
XXXXXEXXXXFLKXX

SEQ ID NO: 1796 - protein, 10 aa, Artificial Sequence
  epitope
SGKELEALPK

SEQ ID NO: 1797 - protein, 10 aa, Artificial Sequence
  epitope
  misc_feature (1)..(2): Xaa can be any naturally occurring amino acid
  misc_feature (4)..(4): Xaa can be any naturally occurring amino acid
  misc_feature (7)..(8): Xaa can be any naturally occurring amino acid
  misc_feature (10)..(10): Xaa can be any naturally occurring amino acid
XXKXLEXXPX

SEQ ID NO: 1798 - protein, 9 aa, Artificial Sequence
  epitope
EALPKFLKN

SEQ ID NO: 1799 - protein, 4 aa, Artificial Sequence
  epitope
KFLK

SEQ ID NO: 1800 - protein, 8 aa, Artificial Sequence
  epitope
KELEALPK

SEQ ID NO: 1801 - protein, 10 aa, Artificial Sequence
  epitope
LEALPKFLKN

SEQ ID NO: 1802 - protein, 10 aa, Artificial Sequence
  epitope
SGKELEALPK

SEQ ID NO: 1803 - protein, 6 aa, Artificial Sequence
  epitope
SGKELE

SEQ ID NO: 1804 - protein, 5 aa, Artificial Sequence
  epitope
KFLKN

SEQ ID NO: 1805 - protein, 15 aa, Artificial Sequence
  epitope
  misc_feature (1)..(2): Xaa can be any naturally occurring amino acid
  misc_feature (5)..(5): Xaa can be any naturally occurring amino acid
  misc_feature (8)..(8): Xaa can be any naturally occurring amino acid
  misc_feature (10)..(15): Xaa can be any naturally occurring amino acid
XXKEXEAXPXXXXXX

SEQ ID NO: 1806 - protein, 7 aa, Artificial Sequence
  epitope
ELEALPK

SEQ ID NO: 1807 - protein, 7 aa, Artificial Sequence
  epitope
PKFLKNG

SEQ ID NO: 1808 - protein, 15 aa, Artificial Sequence
  epitope
  misc_feature (2)..(3): Xaa can be any naturally occurring amino acid
  misc_feature (8)..(8): Xaa can be any naturally occurring amino acid
  misc_feature (10)..(10): Xaa can be any naturally occurring amino acid
  misc_feature (14)..(15): Xaa can be any naturally occurring amino acid
SXXELEAXPXFLKXX

SEQ ID NO: 1809 - protein, 9 aa, Artificial Sequence
  epitope
ELEALPKFL

SEQ ID NO: 1810 - protein, 9 aa, Artificial Sequence
  epitope
  misc_feature (5)..(5): Xaa can be any naturally occurring amino acid
  misc_feature (7)..(7): Xaa can be any naturally occurring amino acid
ELEAXPXFL

SEQ ID NO: 1811 - protein, 9 aa, Artificial Sequence
  epitope
ALPKFLKNG

SEQ ID NO: 1812 - protein, 9 aa, Artificial Sequence
  epitope
  misc_feature (2)..(2): Xaa can be any naturally occurring amino acid
  misc_feature (4)..(4): Xaa can be any naturally occurring amino acid
  misc_feature (8)..(9): Xaa can be any naturally occurring amino acid
AXPXFLKXX

SEQ ID NO: 1813 - protein, 15 aa, Artificial Sequence
  epitope
  misc_feature (1)..(2): Xaa can be any naturally occurring amino acid
  misc_feature (5)..(5): Xaa can be any naturally occurring amino acid
  misc_feature (7)..(8): Xaa can be any naturally occurring amino acid
  misc_feature (10)..(15): Xaa can be any naturally occurring amino acid
XXKEXEXXPXXXXXX

SEQ ID NO: 1814 - protein, 6 aa, Artificial Sequence
  epitope
KELEAL

SEQ ID NO: 1815 - protein, 5 aa, Artificial Sequence
  epitope
PKFLK

SEQ ID NO: 1816 - protein, 8 aa, Artificial Sequence
  epitope
LEALPKFL

SEQ ID NO: 1817 - protein, 6 aa, Artificial Sequence
  epitope
SGKELE

SEQ ID NO: 1818 - protein, 4 aa, Artificial Sequence
  epitope
PKFL

SEQ ID NO: 1819 - protein, 10 aa, Artificial Sequence
  epitope
SGKELEALPK

SEQ ID NO: 1820 - protein, 5 aa, Artificial Sequence
  epitope
PKFLK

SEQ ID NO: 1821 - protein, 10 aa, Artificial Sequence
  epitope
SGKELEALPK

SEQ ID NO: 1822 - protein, 10 aa, Artificial Sequence
  epitope
SGKELEALPK

SEQ ID NO: 1823 - protein, 5 aa, Artificial Sequence
  epitope
LPKFL

SEQ ID NO: 1824 - protein, 6 aa, Artificial Sequence
  epitope
LPKFLK

SEQ ID NO: 1825 - protein, 4 aa, Artificial Sequence
  epitope
LPKF

SEQ ID NO: 1826 - protein, 4 aa, Artificial Sequence
  epitope
PKFL

SEQ ID NO: 1827 - protein, 15 aa, Artificial Sequence
  epitope
  misc_feature (1)..(3): Xaa can be any naturally occurring amino acid
  misc_feature (7)..(11): Xaa can be any naturally occurring amino acid
  misc_feature (13)..(15): Xaa can be any naturally occurring amino acid
XXXELEXXXXXLXXX

SEQ ID NO: 1828 - protein, 9 aa, Artificial Sequence
  epitope
LEALPKFLK

SEQ ID NO: 1829 - protein, 15 aa, Artificial Sequence
  epitope
  misc_feature (1)..(3): Xaa can be any naturally occurring amino acid
  misc_feature (7)..(8): Xaa can be any naturally occurring amino acid
  misc_feature (10)..(11): Xaa can be any naturally occurring amino acid
  misc_feature (13)..(15): Xaa can be any naturally occurring amino acid
XXXELEXXPXXLXXX

SEQ ID NO: 1830 - protein, 5 aa, Artificial Sequence
  epitope
LPKFL

SEQ ID NO: 1831 - protein, 15 aa, Artificial Sequence
  epitope
  misc_feature (1)..(2): Xaa can be any naturally occurring amino acid
  misc_feature (4)..(4): Xaa can be any naturally occurring amino acid
  misc_feature (7)..(8): Xaa can be any naturally occurring amino acid
  misc_feature (10)..(15): Xaa can be any naturally occurring amino acid
XXKXLEXXPXXXXXX

SEQ ID NO: 1832 - protein, 4 aa, Artificial Sequence
  epitope
KELE

SEQ ID NO: 1833 - protein, 5 aa, Artificial Sequence
  epitope
KFLKN

SEQ ID NO: 1834 - protein, 15 aa, Artificial Sequence
  epitope
  misc_feature (1)..(2): Xaa can be any naturally occurring amino acid
  misc_feature (6)..(8): Xaa can be any naturally occurring amino acid
  misc_feature (15)..(15): Xaa can be any naturally occurring amino acid
XXKELXXXPKFLKNX

SEQ ID NO: 1835 - protein, 4 aa, Artificial Sequence
  epitope
KFLK

SEQ ID NO: 1836 - protein, 15 aa, Artificial Sequence
  epitope
VIAEYTVRTLQRTVP

SEQ ID NO: 1837 - protein, 7 aa, Artificial Sequence
  epitope
VRTLQRT

SEQ ID NO: 1838 - protein, 4 aa, Artificial Sequence
  epitope
RTLQ

SEQ ID NO: 1839 - protein, 7 aa, Artificial Sequence
  epitope
TVRTLQR

SEQ ID NO: 1840 - protein, 4 aa, Artificial Sequence
  epitope
RTLQ

SEQ ID NO: 1841 - protein, 7 aa, Artificial Sequence
  epitope
YTVRTLQ

SEQ ID NO: 1842 - protein, 6 aa, Artificial Sequence
  epitope
TVRTLQ

SEQ ID NO: 1843 - protein, 7 aa, Artificial Sequence
  epitope
TVRTLQR

SEQ ID NO: 1844 - protein, 6 aa, Artificial Sequence
  epitope
TVRTLQ

SEQ ID NO: 1845 - protein, 8 aa, Artificial Sequence
  epitope
YTVRTLQR

SEQ ID NO: 1846 - protein, 7 aa, Artificial Sequence
  epitope
TVRTLQR

SEQ ID NO: 1847 - protein, 15 aa, Artificial Sequence
  epitope
  misc_feature (1)..(4): Xaa can be any naturally occurring amino acid
  misc_feature (6)..(6): Xaa can be any naturally occurring amino acid
  misc_feature (8)..(10): Xaa can be any naturally occurring amino acid
  misc_feature (13)..(15): Xaa can be any naturally occurring amino acid
XXXXYXVXXXQRXXX

SEQ ID NO: 1848 - protein, 9 aa, Artificial Sequence
  epitope
YTVRTLQRT

SEQ ID NO: 1849 - protein, 7 aa, Artificial Sequence
  epitope
TVRTLQR

SEQ ID NO: 1850 - protein, 5 aa, Artificial Sequence
  epitope
VRTLQ

SEQ ID NO: 1851 - protein, 15 aa, Artificial Sequence
  epitope
  misc_feature (1)..(4): Xaa can be any naturally occurring amino acid
  misc_feature (8)..(11): Xaa can be any naturally occurring amino acid
  misc_feature (13)..(15): Xaa can be any naturally occurring amino acid
XXXXYTVXXXXRXXX

SEQ ID NO: 1852 - protein, 9 aa, Artificial Sequence
  epitope
YTVRTLQRT

SEQ ID NO: 1853 - protein, 7 aa, Artificial Sequence
  epitope
TVRTLQR

SEQ ID NO: 1854 - protein, 5 aa, Artificial Sequence
  epitope
RTLQR

SEQ ID NO: 1855 - protein, 15 aa, Artificial Sequence
  epitope
  misc_feature (1)..(4): Xaa can be any naturally occurring amino acid
  misc_feature (8)..(10): Xaa can be any naturally occurring amino acid
  misc_feature (13)..(14): Xaa can be any naturally occurring amino acid
XXXXYTVXXXQRXXP

SEQ ID NO: 1856 - protein, 9 aa, Artificial Sequence
  epitope
YTVRTLQRT

SEQ ID NO: 1857 - protein, 7 aa, Artificial Sequence
  epitope
TVRTLQR

SEQ ID NO: 1858 - protein, 4 aa, Artificial Sequence
  epitope
RTLQ

SEQ ID NO: 1859 - protein, 8 aa, Artificial Sequence
  epitope
YTVRTLQR

SEQ ID NO: 1860 - protein, 6 aa, Artificial Sequence
  epitope
TVRTLQ

SEQ ID NO: 1861 - protein, 8 aa, Artificial Sequence
  epitope
TVRTLQRT

SEQ ID NO: 1862 - protein, 5 aa, Artificial Sequence
  epitope
VRTLQ

SEQ ID NO: 1863 - protein, 10 aa, Artificial Sequence
  epitope
VIAEYTVRTL

SEQ ID NO: 1864 - protein, 7 aa, Artificial Sequence
  epitope
TVRTLQR

SEQ ID NO: 1865 - protein, 7 aa, Artificial Sequence
  epitope
TVRTLQR

SEQ ID NO: 1866 - protein, 7 aa, Artificial Sequence
  epitope
TVRTLQR

SEQ ID NO: 1867 - protein, 7 aa, Artificial Sequence
  epitope
TVRTLQR

SEQ ID NO: 1868 - protein, 6 aa, Artificial Sequence
  epitope
TVRTLQ

SEQ ID NO: 1869 - protein, 9 aa, Artificial Sequence
  epitope
YTVRTLQRT

SEQ ID NO: 1870 - protein, 8 aa, Artificial Sequence
  epitope
YTVRTLQR

SEQ ID NO: 1871 - protein, 6 aa, Artificial Sequence
  epitope
VRTLQR

SEQ ID NO: 1872 - protein, 9 aa, Artificial Sequence
  epitope
YTVRTLQRT

SEQ ID NO: 1873 - protein, 7 aa, Artificial Sequence
  epitope
TVRTLQR

SEQ ID NO: 1874 - protein, 15 aa, Artificial Sequence
  epitope
  misc_feature (1)..(4): Xaa can be any naturally occurring amino acid
  misc_feature (8)..(9): Xaa can be any naturally occurring amino acid
  misc_feature (11)..(11): Xaa can be any naturally occurring amino acid
  misc_feature (13)..(15): Xaa can be any naturally occurring amino acid
XXXXYTVXXLXRXXX

SEQ ID NO: 1875 - protein, 9 aa, Artificial Sequence
  epitope
TVRTLQRTV

SEQ ID NO: 1876 - protein, 7 aa, Artificial Sequence
  epitope
VRTLQRT

SEQ ID NO: 1877 - protein, 4 aa, Artificial Sequence
  epitope
TLQR

SEQ ID NO: 1878 - protein, 8 aa, Artificial Sequence
  epitope
TVRTLQRT

SEQ ID NO: 1879 - protein, 6 aa, Artificial Sequence
  epitope
TVRTLQ

SEQ ID NO: 1880 - protein, 8 aa, Artificial Sequence
  epitope
TVRTLQRT

SEQ ID NO: 1881 - protein, 7 aa, Artificial Sequence
  epitope
TVRTLQR

SEQ ID NO: 1882 - protein, 8 aa, Artificial Sequence
  epitope
TVRTLQRT

SEQ ID NO: 1883 - protein, 5 aa, Artificial Sequence
  epitope
VRTLQ

SEQ ID NO: 1884 - protein, 8 aa, Artificial Sequence
  epitope
TVRTLQRT

SEQ ID NO: 1885 - protein, 4 aa, Artificial Sequence
  epitope
RTLQ

SEQ ID NO: 1886 - protein, 8 aa, Artificial Sequence
  epitope
TVRTLQRT

SEQ ID NO: 1887 - protein, 10 aa, Artificial Sequence
  epitope
YTVRTLQRTV

SEQ ID NO: 1888 - protein, 8 aa, Artificial Sequence
  epitope
TVRTLQRT

SEQ ID NO: 1889 - protein, 7 aa, Artificial Sequence
  epitope
TVRTLQR

SEQ ID NO: 1890 - protein, 4 aa, Artificial Sequence
  epitope
RTLQ

SEQ ID NO: 1891 - protein, 6 aa, Artificial Sequence
  epitope
YTVRTL

SEQ ID NO: 1892 - protein, 15 aa, Artificial Sequence
  epitope
  misc_feature (1)..(4): Xaa can be any naturally occurring amino acid
  misc_feature (8)..(9): Xaa can be any naturally occurring amino acid
  misc_feature (14)..(14): Xaa can be any naturally occurring amino acid
XXXXYTVXXLQRTXP

SEQ ID NO: 1893 - protein, 9 aa, Artificial Sequence
  epitope
YTVRTLQRT

SEQ ID NO: 1894 - protein, 5 aa, Artificial Sequence
  epitope
VRTLQ

SEQ ID NO: 1895 - protein, 15 aa, Artificial Sequence
  epitope
QVPLVQQQQFPGQQQ

SEQ ID NO: 1896 - protein, 7 aa, Artificial Sequence
  epitope
VPLVQQQ

SEQ ID NO: 1897 - protein, 6 aa, Artificial Sequence
  epitope
VPLVQQ

SEQ ID NO: 1898 - protein, 8 aa, Artificial Sequence
  epitope
QQFPGQQQ

SEQ ID NO: 1899 - protein, 15 aa, Artificial Sequence
  epitope
  misc_feature (2)..(3): Xaa can be any naturally occurring amino acid
  misc_feature (8)..(15): Xaa can be any naturally occurring amino acid
QXXLVQQXXXXXXXX

SEQ ID NO: 1900 - protein, 7 aa, Artificial Sequence
  epitope
QVPLVQQ

SEQ ID NO: 1901 - protein, 5 aa, Artificial Sequence
  epitope
VPLVQ

SEQ ID NO: 1902 - protein, 7 aa, Artificial Sequence
  epitope
QQFPGQQ

SEQ ID NO: 1903 - protein, 15 aa, Artificial Sequence
  epitope
  misc_feature (3)..(5): Xaa can be any naturally occurring amino acid
  misc_feature (8)..(15): Xaa can be any naturally occurring amino acid
QVXXXQQXXXXXXXX

SEQ ID NO: 1904 - protein, 7 aa, Artificial Sequence
  epitope
QVPLVQQ

SEQ ID NO: 1905 - protein, 5 aa, Artificial Sequence
  epitope
VPLVQ

SEQ ID NO: 1906 - protein, 7 aa, Artificial Sequence
  epitope
QFPGQQQ

SEQ ID NO: 1907 - protein, 15 aa, Artificial Sequence
  epitope
  misc_feature (3)..(5): Xaa can be any naturally occurring amino acid
  misc_feature (8)..(15): Xaa can be any naturally occurring amino acid
QVXXXQQXXXXXXXX

SEQ ID NO: 1908 - protein, 7 aa, Artificial Sequence
  epitope
QVPLVQQ

SEQ ID NO: 1909 - protein, 5 aa, Artificial Sequence
  epitope
VPLVQ

SEQ ID NO: 1910 - protein, 7 aa, Artificial Sequence
  epitope
QFPGQQQ

SEQ ID NO: 1911 - protein, 15 aa, Artificial Sequence
  epitope
  misc_feature (2)..(3): Xaa can be any naturally occurring amino acid
  misc_feature (8)..(15): Xaa can be any naturally occurring amino acid
QXXLVQQXXXXXXXX

SEQ ID NO: 1912 - protein, 8 aa, Artificial Sequence
  epitope
QVPLVQQQ

SEQ ID NO: 1913 - protein, 7 aa, Artificial Sequence
  epitope
QVPLVQQ

SEQ ID NO: 1914 - protein, 7 aa, Artificial Sequence
  epitope
QQFPGQQ

SEQ ID NO: 1915 - protein, 9 aa, Artificial Sequence
  epitope
QVPLVQQQQ

SEQ ID NO: 1916 - protein, 10 aa, Artificial Sequence
  epitope
QQQQFPGQQQ

SEQ ID NO: 1917 - protein, 15 aa, Artificial Sequence
  epitope
  misc_feature (2)..(4): Xaa can be any naturally occurring amino acid
  misc_feature (8)..(13): Xaa can be any naturally occurring amino acid
QXXXVQQXXXXXXQQ

SEQ ID NO: 1918 - protein, 9 aa, Artificial Sequence
  epitope
QVPLVQQQQ

SEQ ID NO: 1919 - protein, 7 aa, Artificial Sequence
  epitope
VPLVQQQ

SEQ ID NO: 1920 - protein, 10 aa, Artificial Sequence
  epitope
LVQQQQFPGQ

SEQ ID NO: 1921 - protein, 8 aa, Artificial Sequence
  epitope
QVPLVQQQ

SEQ ID NO: 1922 - protein, 7 aa, Artificial Sequence
  epitope
QVPLVQQ

SEQ ID NO: 1923 - protein, 8 aa, Artificial Sequence
  epitope
QQFPGQQQ

SEQ ID NO: 1924 - protein, 5 aa, Artificial Sequence
  epitope
FPGQQ

SEQ ID NO: 1925 - protein, 6 aa, Artificial Sequence
  epitope
QFPGQQ

SEQ ID NO: 1926 - protein, 9 aa, Artificial Sequence
  epitope
QQQFPGQQQ

SEQ ID NO: 1927 - protein, 6 aa, Artificial Sequence
  epitope
QFPGQQ

SEQ ID NO: 1928 - protein, 7 aa, Artificial Sequence
  epitope
VPLVQQQ

SEQ ID NO: 1929 - protein, 7 aa, Artificial Sequence
  epitope
QFPGQQQ

SEQ ID NO: 1930 - protein, 6 aa, Artificial Sequence
  epitope
FPGQQQ

SEQ ID NO: 1931 - protein, 15 aa, Artificial Sequence
  epitope
  misc_feature (2)..(4): Xaa can be any naturally occurring amino acid
  misc_feature (8)..(14): Xaa can be any naturally occurring amino acid
QXXXVQQXXXXXXXQ

SEQ ID NO: 1932 - protein, 8 aa, Artificial Sequence
  epitope
QVPLVQQQ

SEQ ID NO: 1933 - protein, 6 aa, Artificial Sequence
  epitope
VPLVQQ

SEQ ID NO: 1934 - protein, 15 aa, Artificial Sequence
  epitope
  misc_feature (1)..(4): Xaa can be any naturally occurring amino acid
  misc_feature (10)..(12): Xaa can be any naturally occurring amino acid
XXXXVQQQQXXXQQQ

SEQ ID NO: 1935 - protein, 15 aa, Artificial Sequence
  epitope
  misc_feature (1)..(5): Xaa can be any naturally occurring amino acid
  misc_feature (8)..(13): Xaa can be any naturally occurring amino acid
XXXXXQQXXXXXXQQ

SEQ ID NO: 1936 - protein, 7 aa, Artificial Sequence
  epitope
QVPLVQQ

SEQ ID NO: 1937 - protein, 8 aa, Artificial Sequence
  epitope
QQFPGQQQ

SEQ ID NO: 1938 - protein, 6 aa, Artificial Sequence
  epitope
QFPGQQ

SEQ ID NO: 1939 - protein, 7 aa, Artificial Sequence
  epitope
QVPLVQQ

SEQ ID NO: 1940 - protein, 5 aa, Artificial Sequence
  epitope
VPLVQ

SEQ ID NO: 1941 - protein, 8 aa, Artificial Sequence
  epitope
QQFPGQQQ

SEQ ID NO: 1942 - protein, 7 aa, Artificial Sequence
  epitope
QQFPGQQ

SEQ ID NO: 1943 - protein, 6 aa, Artificial Sequence
  epitope
QFPGQQ

SEQ ID NO: 1944 - protein, 7 aa, Artificial Sequence
  epitope
QFPGQQQ

SEQ ID NO: 1945 - protein, 5 aa, Artificial Sequence
  epitope
FPGQQ

SEQ ID NO: 1946 - protein, 4 aa, Artificial Sequence
  epitope
FPGQ

SEQ ID NO: 1947 - protein, 15 aa, Artificial Sequence
  epitope
  misc_feature (1)..(5): Xaa can be any naturally occurring amino acid
  misc_feature (8)..(12): Xaa can be any naturally occurring amino acid
XXXXXQQXXXXXQQQ

SEQ ID NO: 1948 - protein, 8 aa, Artificial Sequence
  epitope
QVPLVQQQ

SEQ ID NO: 1949 - protein, 6 aa, Artificial Sequence
  epitope
VPLVQQ

SEQ ID NO: 1950 - protein, 9 aa, Artificial Sequence
  epitope
QQQFPGQQQ

SEQ ID NO: 1951 - protein, 7 aa, Artificial Sequence
  epitope
QFPGQQQ

SEQ ID NO: 1952 - protein, 6 aa, Artificial Sequence
  epitope
QFPGQQ

SEQ ID NO: 1953 - protein, 15 aa, Artificial Sequence
  epitope
  misc_feature (1)..(7): Xaa can be any naturally occurring amino acid
  misc_feature (9)..(10): Xaa can be any naturally occurring amino acid
  misc_feature (15)..(15): Xaa can be any naturally occurring amino acid
XXXXXXXQXXPGQQX

SEQ ID NO: 1954 - protein, 7 aa, Artificial Sequence
  epitope
QQFPGQQ

SEQ ID NO: 1955 - protein, 5 aa, Artificial Sequence
  epitope
QFPGQ

SEQ ID NO: 1956 - protein, 15 aa, Artificial Sequence
  epitope
  misc_feature (1)..(7): Xaa can be any naturally occurring amino acid
  misc_feature (9)..(10): Xaa can be any naturally occurring amino acid
XXXXXXXQXXPGQQQ

SEQ ID NO: 1957 - protein, 15 aa, Artificial Sequence
  epitope
  misc_feature (1)..(10): Xaa can be any naturally occurring amino acid
XXXXXXXXXXPGQQQ

SEQ ID NO: 1958 - protein, 8 aa, Artificial Sequence
  epitope
QQFPGQQQ

SEQ ID NO: 1959 - protein, 6 aa, Artificial Sequence
  epitope
QFPGQQ

SEQ ID NO: 1960 - protein, 6 aa, Artificial Sequence
  epitope
  misc_feature (1)..(2): Xaa can be any naturally occurring amino acid
XXPGQQ

SEQ ID NO: 1961 - protein, 9 aa, Artificial Sequence
  epitope
QQQQFPGQQ

SEQ ID NO: 1962 - protein, 8 aa, Artificial Sequence
  epitope
QQQFPGQQ

SEQ ID NO: 1963 - protein, 15 aa, Artificial Sequence
  epitope
  misc_feature (1)..(5): Xaa can be any naturally occurring amino acid
  misc_feature (7)..(7): Xaa can be any naturally occurring amino acid
  misc_feature (10)..(12): Xaa can be any naturally occurring amino acid
XXXXXQXQQXXXQQQ

SEQ ID NO: 1964 - protein, 8 aa, Artificial Sequence
  epitope
QQQFPGQQ

SEQ ID NO: 1965 - protein, 7 aa, Artificial Sequence
  epitope
QQFPGQQ

SEQ ID NO: 1966 - protein, 6 aa, Artificial Sequence
  epitope
QFPGQQ

SEQ ID NO: 1967 - protein, 7 aa, Artificial Sequence
  epitope
VPLVQQQ

SEQ ID NO: 1968 - protein, 6 aa, Artificial Sequence
  epitope
QFPGQQ

SEQ ID NO: 1969 - protein, 15 aa, Artificial Sequence
  epitope
  misc_feature (3)..(3): Xaa can be any naturally occurring amino acid
  misc_feature (8)..(10): Xaa can be any naturally occurring amino acid
QVXLVQQXXXPGQQQ

SEQ ID NO: 1970 - protein, 15 aa, Artificial Sequence
  epitope
  misc_feature (2)..(3): Xaa can be any naturally occurring amino acid
  misc_feature (8)..(14): Xaa can be any naturally occurring amino acid
QXXLVQQXXXXXXXQ

SEQ ID NO: 1971 - protein, 15 aa, Artificial Sequence
  epitope
  misc_feature (1)..(3): Xaa can be any naturally occurring amino acid
  misc_feature (8)..(15): Xaa can be any naturally occurring amino acid
XXXLVQQXXXXXXXX

SEQ ID NO: 1972 - protein, 9 aa, Artificial Sequence
  epitope
QVPLVQQQQ

SEQ ID NO: 1973 - protein, 8 aa, Artificial Sequence
  epitope
QVPLVQQQ

SEQ ID NO: 1974 - protein, 6 aa, Artificial Sequence
  epitope
VPLVQQ

SEQ ID NO: 1975 - protein, 8 aa, Artificial Sequence
  epitope
LVQQQQFP

SEQ ID NO: 1976 - protein, 15 aa, Artificial Sequence
  epitope
  misc_feature (1)..(9): Xaa can be any naturally occurring amino acid
  misc_feature (14)..(15): Xaa can be any naturally occurring amino acid
XXXXXXXXXFPGQXX

SEQ ID NO: 1977 - protein, 15 aa, Artificial Sequence
  epitope
DPTGAKVTKAAIKKK

SEQ ID NO: 1978 - protein, 8 aa, Artificial Sequence
  epitope
PTGAKVTK

SEQ ID NO: 1979 - protein, 4 aa, Artificial Sequence
  epitope
TGAK

SEQ ID NO: 1980 - protein, 5 aa, Artificial Sequence
  epitope
AAIKK

SEQ ID NO: 1981 - protein, 6 aa, Artificial Sequence
  epitope
DPTGAK

SEQ ID NO: 1982 - protein, 5 aa, Artificial Sequence
  epitope
PTGAK

SEQ ID NO: 1983 - protein, 10 aa, Artificial Sequence
  epitope
GAKVTKAAIK

SEQ ID NO: 1984 - protein, 15 aa, Artificial Sequence
  epitope
  misc_feature (3)..(3): Xaa can be any naturally occurring amino acid
  misc_feature (5)..(5): Xaa can be any naturally occurring amino acid
  misc_feature (7)..(15): Xaa can be any naturally occurring amino acid
DPXGXKXXXXXXXXX

SEQ ID NO: 1985 - protein, 8 aa, Artificial Sequence
  epitope
PTGAKVTK

SEQ ID NO: 1986 - protein, 4 aa, Artificial Sequence
  epitope
AAIK

SEQ ID NO: 1987 - protein, 6 aa, Artificial Sequence
  epitope
KAAIKK

SEQ ID NO: 1988 - protein, 4 aa, Artificial Sequence
  epitope
AAIK

SEQ ID NO: 1989 - protein, 15 aa, Artificial Sequence
  epitope
  misc_feature (1)..(8): Xaa can be any naturally occurring amino acid
  misc_feature (14)..(15): Xaa can be any naturally occurring amino acid
XXXXXXXXKAAIKXX

SEQ ID NO: 1990 - protein, 15 aa, Artificial Sequence
  epitope
  misc_feature (1)..(1): Xaa can be any naturally occurring amino acid
  misc_feature (3)..(3): Xaa can be any naturally occurring amino acid
  misc_feature (14)..(15): Xaa can be any naturally occurring amino acid
XPXGAKVTKAAIKXX

SEQ ID NO: 1991 - protein, 15 aa, Artificial Sequence
  epitope
  misc_feature (1)..(6): Xaa can be any naturally occurring amino acid
  misc_feature (8)..(8): Xaa can be any naturally occurring amino acid
  misc_feature (14)..(15): Xaa can be any naturally occurring amino acid
XXXXXXVXKAAIKXX

SEQ ID NO: 1992 - protein, 4 aa, Artificial Sequence
  epitope
TGAK

SEQ ID NO: 1993 - protein, 15 aa, Artificial Sequence
  epitope
  misc_feature (1)..(4): Xaa can be any naturally occurring amino acid
  misc_feature (6)..(7): Xaa can be any naturally occurring amino acid
  misc_feature (14)..(15): Xaa can be any naturally occurring amino acid
XXXXAXXTKAAIKXX

SEQ ID NO: 1994 - protein, 15 aa, Artificial Sequence
  epitope
  misc_feature (1)..(6): Xaa can be any naturally occurring amino acid
  misc_feature (9)..(9): Xaa can be any naturally occurring amino acid
  misc_feature (12)..(15): Xaa can be any naturally occurring amino acid
XXXXXXVTXAAXXXX

SEQ ID NO: 1995 - protein, 9 aa, Artificial Sequence
  epitope
DPTGAKVTK

SEQ ID NO: 1996 - protein, 5 aa, Artificial Sequence
  epitope
VTKAA

SEQ ID NO: 1997 - protein, 15 aa, Artificial Sequence
  epitope
  misc_feature (1)..(4): Xaa can be any naturally occurring amino acid
  misc_feature (8)..(10): Xaa can be any naturally occurring amino acid
  misc_feature (12)..(15): Xaa can be any naturally occurring amino acid
XXXXAKVXXXAXXXX

SEQ ID NO: 1998 - protein, 4 aa, Artificial Sequence
  epitope
KVTK

SEQ ID NO: 1999 - protein, 15 aa, Artificial Sequence
  epitope
  misc_feature (13)..(15): Xaa can be any naturally occurring amino acid
DPTGAKVTKAAIXXX

SEQ ID NO: 2000 - protein, 15 aa, Artificial Sequence
  epitope
  misc_feature (1)..(5): Xaa can be any naturally occurring amino acid
  misc_feature (9)..(9): Xaa can be any naturally occurring amino acid
  misc_feature (13)..(15): Xaa can be any naturally occurring amino acid
XXXXXKVTXAAIXXX

SEQ ID NO: 2001 - protein, 6 aa, Artificial Sequence
  epitope
GAKVTK

SEQ ID NO: 2002 - protein, 15 aa, Artificial Sequence
  epitope
  misc_feature (1)..(4): Xaa can be any naturally occurring amino acid
  misc_feature (12)..(15): Xaa can be any naturally occurring amino acid
XXXXAKVTKAAXXXX

SEQ ID NO: 2003 - protein, 15 aa, Artificial Sequence
  epitope
  misc_feature (1)..(5): Xaa can be any naturally occurring amino acid
  misc_feature (9)..(10): Xaa can be any naturally occurring amino acid
  misc_feature (12)..(15): Xaa can be any naturally occurring amino acid
XXXXXKVTXXAXXXX

SEQ ID NO: 2004 - protein, 15 aa, Artificial Sequence
  epitope
STGTIGKRFASINVE

SEQ ID NO: 2005 - protein, 15 aa, Artificial Sequence
  epitope
  misc_feature (1)..(5): Xaa can be any naturally occurring amino acid
  misc_feature (7)..(7): Xaa can be any naturally occurring amino acid
  misc_feature (9)..(9): Xaa can be any naturally occurring amino acid
  misc_feature (12)..(15): Xaa can be any naturally occurring amino acid
XXXXXGXRXASXXXX

SEQ ID NO: 2006 - protein, 5 aa, Artificial Sequence
  epitope
ASINV

SEQ ID NO: 2007 - protein, 15 aa, Artificial Sequence
  epitope
  misc_feature (1)..(1): Xaa can be any naturally occurring amino acid
  misc_feature (3)..(3): Xaa can be any naturally occurring amino acid
  misc_feature (7)..(7): Xaa can be any naturally occurring amino acid
  misc_feature (9)..(15): Xaa can be any naturally occurring amino acid
XTXTIGXRXXXXXXX

SEQ ID NO: 2008 - protein, 6 aa, Artificial Sequence
  epitope
KRFASI

SEQ ID NO: 2009 - protein, 4 aa, Artificial Sequence
  epitope
KRFA

SEQ ID NO: 2010 - protein, 4 aa, Artificial Sequence
  epitope
KRFA

SEQ ID NO: 2011 - protein, 4 aa, Artificial Sequence
  epitope
KRFA

SEQ ID NO: 2012 - protein, 15 aa, Artificial Sequence
  epitope
  misc_feature (1)..(2): Xaa can be any naturally occurring amino acid
  misc_feature (7)..(7): Xaa can be any naturally occurring amino acid
  misc_feature (9)..(12): Xaa can be any naturally occurring amino acid
  misc_feature (14)..(15): Xaa can be any naturally occurring amino acid
XXGTIGXRXXXXNXX

SEQ ID NO: 2013 - protein, 15 aa, Artificial Sequence
  epitope
  misc_feature (1)..(2): Xaa can be any naturally occurring amino acid
  misc_feature (7)..(7): Xaa can be any naturally occurring amino acid
  misc_feature (9)..(15): Xaa can be any naturally occurring amino acid
XXGTIGXRXXXXXXX

SEQ ID NO: 2014 - protein, 4 aa, Artificial Sequence
  epitope
KRFA

SEQ ID NO: 2015 - protein, 5 aa, Artificial Sequence
  epitope
KRFAS

SEQ ID NO: 2016 - protein, 15 aa, Artificial Sequence
  epitope
  misc_feature (1)..(3): Xaa can be any naturally occurring amino acid
  misc_feature (7)..(7): Xaa can be any naturally occurring amino acid
  misc_feature (9)..(15): Xaa can be any naturally occurring amino acid
XXXTIGXRXXXXXXX

SEQ ID NO: 2017 - protein, 8 aa, Artificial Sequence
  epitope
TGTIGKRF

SEQ ID NO: 2018 - protein, 7 aa, Artificial Sequence
  epitope
KRFASIN

SEQ ID NO: 2019 - protein, 7 aa, Artificial Sequence
  epitope
KRFASIN

SEQ ID NO: 2020 - protein, 10 aa, Artificial Sequence
  epitope
STGTIGKRFA

SEQ ID NO: 2021 - protein, 8 aa, Artificial Sequence
  epitope
GKRFASIN

SEQ ID NO: 2022 - protein, 6 aa, Artificial Sequence
  epitope
RFASIN

SEQ ID NO: 2023 - protein, 7 aa, Artificial Sequence
  epitope
KRFASIN

SEQ ID NO: 2024 - protein, 4 aa, Artificial Sequence
  epitope
KRFA

SEQ ID NO: 2025 - protein, 5 aa, Artificial Sequence
  epitope
TGTIG

SEQ ID NO: 2026 - protein, 7 aa, Artificial Sequence
  epitope
KRFASIN

SEQ ID NO: 2027 - protein, 15 aa, Artificial Sequence
  epitope
TPGALQYLSGVILFE

SEQ ID NO: 2028 - protein, 10 aa, Artificial Sequence
  epitope
PGALQYLSGV

SEQ ID NO: 2029 - protein, 8 aa, Artificial Sequence
  epitope
YLSGVILF

SEQ ID NO: 2030 - protein, 5 aa, Artificial Sequence
  epitope
GVILF

SEQ ID NO: 2031 - protein, 5 aa, Artificial Sequence
  epitope
YLSGV

SEQ ID NO: 2032 - protein, 8 aa, Artificial Sequence
  epitope
YLSGVILF

SEQ ID NO: 2033 - protein, 5 aa, Artificial Sequence
  epitope
YLSGV

SEQ ID NO: 2034 - protein, 8 aa, Artificial Sequence
  epitope
PGALQYLS

SEQ ID NO: 2035 - protein, 8 aa, Artificial Sequence
  epitope
YLSGVILF

SEQ ID NO: 2036 - protein, 5 aa, Artificial Sequence
  epitope
GVILF

SEQ ID NO: 2037 - protein, 10 aa, Artificial Sequence
  epitope
PGALQYLSGV

SEQ ID NO: 2038 - protein, 8 aa, Artificial Sequence
  epitope
YLSGVILF

SEQ ID NO: 2039 - protein, 6 aa, Artificial Sequence
  epitope
LSGVIL

SEQ ID NO: 2040 - protein, 8 aa, Artificial Sequence
  epitope
YLSGVILF

SEQ ID NO: 2041 - protein, 10 aa, Artificial Sequence
  epitope
PGALQYLSGV

SEQ ID NO: 2042 - protein, 8 aa, Artificial Sequence
  epitope
YLSGVILF

SEQ ID NO: 2043 - protein, 15 aa, Artificial Sequence
  epitope
  misc_feature (1)..(1): Xaa can be any naturally occurring amino acid
  misc_feature (3)..(5): Xaa can be any naturally occurring amino acid
  misc_feature (8)..(8): Xaa can be any naturally occurring amino acid
  misc_feature (10)..(13): Xaa can be any naturally occurring amino acid
  misc_feature (15)..(15): Xaa can be any naturally occurring amino acid
XPXXXQYXSXXXXFX

SEQ ID NO: 2044 - protein, 9 aa, Artificial Sequence
  epitope
YLSGVILFE

SEQ ID NO: 2045 - protein, 8 aa, Artificial Sequence
  epitope
YLSGVILF

SEQ ID NO: 2046 - protein, 10 aa, Artificial Sequence
  epitope
PGALQYLSGV

SEQ ID NO: 2047 - protein, 7 aa, Artificial Sequence
  epitope
YLSGVIL

SEQ ID NO: 2048 - protein, 4 aa, Artificial Sequence
  epitope
GVIL

SEQ ID NO: 2049 - protein, 4 aa, Artificial Sequence
  epitope
GALQ

SEQ ID NO: 2050 - protein, 5 aa, Artificial Sequence
  epitope
GVILF

SEQ ID NO: 2051 - protein, 10 aa, Artificial Sequence
  epitope
PGALQYLSGV

SEQ ID NO: 2052 - protein, 8 aa, Artificial Sequence
  epitope
YLSGVILF

SEQ ID NO: 2053 - protein, 10 aa, Artificial Sequence
  epitope
PGALQYLSGV

SEQ ID NO: 2054 - protein, 4 aa, Artificial Sequence
  epitope
GALQ

SEQ ID NO: 2055 - protein, 8 aa, Artificial Sequence
  epitope
YLSGVILF

SEQ ID NO: 2056 - protein, 5 aa, Artificial Sequence
  epitope
GVILF

SEQ ID NO: 2057 - protein, 5 aa, Artificial Sequence
  epitope
PGALQ

SEQ ID NO: 2058 - protein, 8 aa, Artificial Sequence
  epitope
YLSGVILF

SEQ ID NO: 2059 - protein, 6 aa, Artificial Sequence
  epitope
YLSGVI

SEQ ID NO: 2060 - protein, 8 aa, Artificial Sequence
  epitope
YLSGVILF

SEQ ID NO: 2061 - protein, 4 aa, Artificial Sequence
  epitope
LSGV

SEQ ID NO: 2062 - protein, 6 aa, Artificial Sequence
  epitope
LSGVIL

SEQ ID NO: 2063 - protein, 9 aa, Artificial Sequence
  epitope
TPGALQYLS

SEQ ID NO: 2064 - protein, 8 aa, Artificial Sequence
  epitope
YLSGVILF

SEQ ID NO: 2065 - protein, 5 aa, Artificial Sequence
  epitope
GVILF

SEQ ID NO: 2066 - protein, 8 aa, Artificial Sequence
  epitope
YLSGVILF

SEQ ID NO: 2067 - protein, 4 aa, Artificial Sequence
  epitope
GVIL

SEQ ID NO: 2068 - protein, 15 aa, Artificial Sequence
  epitope
PPYCTIAPFGIFGTN

SEQ ID NO: 2069 - protein, 15 aa, Artificial Sequence
  epitope
  misc_feature (1)..(2): Xaa can be any naturally occurring amino acid
  misc_feature (4)..(4): Xaa can be any naturally occurring amino acid
  misc_feature (6)..(6): Xaa can be any naturally occurring amino acid
XXYXTXAPFGIFGTN

SEQ ID NO: 2070 - protein, 9 aa, Artificial Sequence
  epitope
YCTIAPFGI

SEQ ID NO: 2071 - protein, 5 aa, Artificial Sequence
  epitope
CTIAP

SEQ ID NO: 2072 - protein, 8 aa, Artificial Sequence
  epitope
PFGIFGTN

SEQ ID NO: 2073 - protein, 8 aa, Artificial Sequence
  epitope
  misc_feature (3)..(3): Xaa can be any naturally occurring amino acid
  misc_feature (6)..(8): Xaa can be any naturally occurring amino acid
PFXIFXXX

SEQ ID NO: 2074 - protein, 9 aa, Artificial Sequence
  epitope
CTIAPFGIF

SEQ ID NO: 2075 - protein, 8 aa, Artificial Sequence
  epitope
PFGIFGTN

SEQ ID NO: 2076 - protein, 6 aa, Artificial Sequence
  epitope
GIFGTN

SEQ ID NO: 2077 - protein, 5 aa, Artificial Sequence
  epitope
CTIAP

SEQ ID NO: 2078 - protein, 9 aa, Artificial Sequence
  epitope
YCTIAPFGI

SEQ ID NO: 2079 - protein, 8 aa, Artificial Sequence
  epitope
CTIAPFGI

SEQ ID NO: 2080 - protein, 8 aa, Artificial Sequence
  epitope
PFGIFGTN

SEQ ID NO: 2081 - protein, 6 aa, Artificial Sequence
  epitope
GIFGTN

SEQ ID NO: 2082 - protein, 15 aa, Artificial Sequence
  epitope
  misc_feature (1)..(2): Xaa can be any naturally occurring amino acid
  misc_feature (4)..(7): Xaa can be any naturally occurring amino acid
  misc_feature (10)..(10): Xaa can be any naturally occurring amino acid
  misc_feature (13)..(13): Xaa can be any naturally occurring amino acid
XXYXXXXPFXIFXTN

SEQ ID NO: 2083 - protein, 10 aa, Artificial Sequence
  epitope
YCTIAPFGIF

SEQ ID NO: 2084 - protein, 8 aa, Artificial Sequence
  epitope
CTIAPFGI

SEQ ID NO: 2085 - protein, 8 aa, Artificial Sequence
  epitope
PFGIFGTN

SEQ ID NO: 2086 - protein, 10 aa, Artificial Sequence
  epitope
YCTIAPFGIF

SEQ ID NO: 2087 - protein, 8 aa, Artificial Sequence
  epitope
CTIAPFGI

SEQ ID NO: 2088 - protein, 6 aa, Artificial Sequence
  epitope
GIFGTN

SEQ ID NO: 2089 - protein, 10 aa, Artificial Sequence
  epitope
YCTIAPFGIF

SEQ ID NO: 2090 - protein, 5 aa, Artificial Sequence
  epitope
CTIAP

SEQ ID NO: 2091 - protein, 8 aa, Artificial Sequence
  epitope
PFGIFGTN

SEQ ID NO: 2092 - protein, 8 aa, Artificial Sequence
  epitope
  misc_feature (3)..(3): Xaa can be any naturally occurring amino acid
  misc_feature (6)..(8): Xaa can be any naturally occurring amino acid
PFXIFXXX

SEQ ID NO: 2093 - protein, 9 aa, Artificial Sequence
  epitope
YCTIAPFGI

SEQ ID NO: 2094 - protein, 7 aa, Artificial Sequence
  epitope
CTIAPFG

SEQ ID NO: 2095 - protein, 6 aa, Artificial Sequence
  epitope
GIFGTN

SEQ ID NO: 2096 - protein, 8 aa, Artificial Sequence
  epitope
CTIAPFGI

SEQ ID NO: 2097 - protein, 8 aa, Artificial Sequence
  epitope
PFGIFGTN

SEQ ID NO: 2098 - protein, 9 aa, Artificial Sequence
  epitope
CTIAPFGIF

SEQ ID NO: 2099 - protein, 8 aa, Artificial Sequence
  epitope
  misc_feature (3)..(3): Xaa can be any naturally occurring amino acid
  misc_feature (6)..(8): Xaa can be any naturally occurring amino acid
PFXIFXXX

SEQ ID NO: 2100 - protein, 8 aa, Artificial Sequence
  epitope
PFGIFGTN

SEQ ID NO: 2101 - protein, 15 aa, Artificial Sequence
  epitope
  misc_feature (1)..(2): Xaa can be any naturally occurring amino acid
  misc_feature (4)..(7): Xaa can be any naturally occurring amino acid
  misc_feature (10)..(11): Xaa can be any naturally occurring amino acid
  misc_feature (13)..(15): Xaa can be any naturally occurring amino acid
XXYXXXXPFXXFXXX

SEQ ID NO: 2102 - protein, 9 aa, Artificial Sequence
  epitope
CTIAPFGIF

SEQ ID NO: 2103 - protein, 5 aa, Artificial Sequence
  epitope
CTIAP

SEQ ID NO: 2104 - protein, 8 aa, Artificial Sequence
  epitope
PFGIFGTN

SEQ ID NO: 2105 - protein, 9 aa, Artificial Sequence
  epitope
CTIAPFGIF

SEQ ID NO: 2106 - protein, 7 aa, Artificial Sequence
  epitope
FGIFGTN

SEQ ID NO: 2107 - protein, 9 aa, Artificial Sequence
  epitope
CTIAPFGIF

SEQ ID NO: 2108 - protein, 6 aa, Artificial Sequence
  epitope
GIFGTN

SEQ ID NO: 2109 - protein, 9 aa, Artificial Sequence
  epitope
CTIAPFGIF

SEQ ID NO: 2110 - protein, 8 aa, Artificial Sequence
  epitope
PFGIFGTN

SEQ ID NO: 2111 - protein, 15 aa, Artificial Sequence
  epitope
  misc_feature (1)..(2): Xaa can be any naturally occurring amino acid
  misc_feature (4)..(6): Xaa can be any naturally occurring amino acid
  misc_feature (14)..(14): Xaa can be any naturally occurring amino acid
XXYXXXAPFGIFGXN

SEQ ID NO: 2112 - protein, 10 aa, Artificial Sequence
  epitope
YCTIAPFGIF

SEQ ID NO: 2113 - protein, 6 aa, Artificial Sequence
  epitope
YCTIAP

SEQ ID NO: 2114 - protein, 8 aa, Artificial Sequence
  epitope
PFGIFGTN

SEQ ID NO: 2115 - protein, 9 aa, Artificial Sequence
  epitope
CTIAPFGIF

SEQ ID NO: 2116 - protein, 5 aa, Artificial Sequence
  epitope
CTIAP

SEQ ID NO: 2117 - protein, 8 aa, Artificial Sequence
  epitope
PFGIFGTN

SEQ ID NO: 2118 - protein, 8 aa, Artificial Sequence
  epitope
  misc_feature (3)..(3): Xaa can be any naturally occurring amino acid
  misc_feature (6)..(8): Xaa can be any naturally occurring amino acid
PFXIFXXX

SEQ ID NO: 2119 - protein, 8 aa, Artificial Sequence
  epitope
CTIAPFGI

SEQ ID NO: 2120 - protein, 4 aa, Artificial Sequence
  epitope
CTIA

SEQ ID NO: 2121 - protein, 8 aa, Artificial Sequence
  epitope
PFGIFGTN

SEQ ID NO: 2122 - protein, 15 aa, Artificial Sequence
  epitope
  misc_feature (1)..(7): Xaa can be any naturally occurring amino acid
  misc_feature (10)..(10): Xaa can be any naturally occurring amino acid
  misc_feature (13)..(14): Xaa can be any naturally occurring amino acid
XXXXXXXPFXIFXXN

SEQ ID NO: 2123 - protein, 10 aa, Artificial Sequence
  epitope
YCTIAPFGIF

SEQ ID NO: 2124 - protein, 8 aa, Artificial Sequence
  epitope
CTIAPFGI

SEQ ID NO: 2125 - protein, 7 aa, Artificial Sequence
  epitope
FGIFGTN

SEQ ID NO: 2126 - protein, 15 aa, Artificial Sequence
  epitope
  misc_feature (1)..(7): Xaa can be any naturally occurring amino acid
  misc_feature (10)..(10): Xaa can be any naturally occurring amino acid
  misc_feature (13)..(15): Xaa can be any naturally occurring amino acid
XXXXXXXPFXIFXXX

SEQ ID NO: 2127 - protein, 5 aa, Artificial Sequence
  epitope
CTIAP

SEQ ID NO: 2128 - protein, 15 aa, Artificial Sequence
  epitope
  misc_feature (1)..(2): Xaa can be any naturally occurring amino acid
  misc_feature (4)..(4): Xaa can be any naturally occurring amino acid
  misc_feature (6)..(7): Xaa can be any naturally occurring amino acid
  misc_feature (13)..(15): Xaa can be any naturally occurring amino acid
XXYXTXXPFGIFXXX

SEQ ID NO: 2129 - protein, 10 aa, Artificial Sequence
  epitope
YCTIAPFGIF

SEQ ID NO: 2130 - protein, 8 aa, Artificial Sequence
  epitope
PFGIFGTN

SEQ ID NO: 2131 - protein, 15 aa, Artificial Sequence
  epitope
  misc_feature (1)..(7): Xaa can be any naturally occurring amino acid
  misc_feature (10)..(10): Xaa can be any naturally occurring amino acid
  misc_feature (13)..(15): Xaa can be any naturally occurring amino acid
XXXXXXXPFXIFXXX

SEQ ID NO: 2132 - protein, 10 aa, Artificial Sequence
  epitope
YCTIAPFGIF

SEQ ID NO: 2133 - protein, 9 aa, Artificial Sequence
  epitope
YCTIAPFGI

SEQ ID NO: 2134 - protein, 15 aa, Artificial Sequence
  epitope
  misc_feature (1)..(7): Xaa can be any naturally occurring amino acid
  misc_feature (10)..(10): Xaa can be any naturally occurring amino acid
  misc_feature (13)..(14): Xaa can be any naturally occurring amino acid
XXXXXXXPFXIFXXN

SEQ ID NO: 2135 - protein, 10 aa, Artificial Sequence
  epitope
PPYCTIAPFG

SEQ ID NO: 2136 - protein, 9 aa, Artificial Sequence
  epitope
CTIAPFGIF

SEQ ID NO: 2137 - protein, 9 aa, Artificial Sequence
  epitope
  misc_feature (1)..(4): Xaa can be any naturally occurring amino acid
  misc_feature (7)..(7): Xaa can be any naturally occurring amino acid
XXXXPFXIF

SEQ ID NO: 2138 - protein, 4 aa, Artificial Sequence
  epitope
FGTN

SEQ ID NO: 2139 - protein, 15 aa, Artificial Sequence
  epitope
  misc_feature (1)..(2): Xaa can be any naturally occurring amino acid
  misc_feature (4)..(7): Xaa can be any naturally occurring amino acid
XXYXXXXPFGIFGTN

SEQ ID NO: 2140 - protein, 10 aa, Artificial Sequence
  epitope
YCTIAPFGIF

SEQ ID NO: 2141 - protein, 10 aa, Artificial Sequence
  epitope
  misc_feature (2)..(5): Xaa can be any naturally occurring amino acid
YXXXXPFGIF

SEQ ID NO: 2142 - protein, 10 aa, Artificial Sequence
  epitope
  misc_feature (1)..(5): Xaa can be any naturally occurring amino acid
XXXXXPFGIF

SEQ ID NO: 2143 - protein, 10 aa, Artificial Sequence
  epitope
IAPFGIFGTN

SEQ ID NO: 2144 - protein, 7 aa, Artificial Sequence
  epitope
FGIFGTN

SEQ ID NO: 2145 - protein, 7 aa, Artificial Sequence
  epitope
  misc_feature (5)..(7): Xaa can be any naturally occurring amino acid
FGIFXXX

SEQ ID NO: 2146 - protein, 15 aa, Artificial Sequence
  epitope
  misc_feature (1)..(7): Xaa can be any naturally occurring amino acid
  misc_feature (10)..(10): Xaa can be any naturally occurring amino acid
  misc_feature (13)..(15): Xaa can be any naturally occurring amino acid
XXXXXXXPFXIFXXX

SEQ ID NO: 2147 - protein, 9 aa, Artificial Sequence
  epitope
CTIAPFGIF

SEQ ID NO: 2148 - protein, 8 aa, Artificial Sequence
  epitope
PFGIFGTN

SEQ ID NO: 2149 - protein, 4 aa, Artificial Sequence
  epitope
FGIF

SEQ ID NO: 2150 - protein, 15 aa, Artificial Sequence
  epitope
  misc_feature (1)..(7): Xaa can be any naturally occurring amino acid
  misc_feature (13)..(15): Xaa can be any naturally occurring amino acid
XXXXXXXPFGIFXXX

SEQ ID NO: 2151 - protein, 9 aa, Artificial Sequence
  epitope
YCTIAPFGI

SEQ ID NO: 2152 - protein, 10 aa, Artificial Sequence
  epitope
IAPFGIFGTN

SEQ ID NO: 2153 - protein, 6 aa, Artificial Sequence
  epitope
GIFGTN

SEQ ID NO: 2154 - protein, 15 aa, Artificial Sequence
  epitope
YSQPQQPISQQQQQQ

SEQ ID NO: 2155 - protein, 10 aa, Artificial Sequence
  epitope
YSQPQQPISQ

SEQ ID NO: 2156 - protein, 9 aa, Artificial Sequence
  epitope
YSQPQQPIS

SEQ ID NO: 2157 - protein, 5 aa, Artificial Sequence
  epitope
SQPQQ

SEQ ID NO: 2158 - protein, 10 aa, Artificial Sequence
  epitope
YSQPQQPISQ

SEQ ID NO: 2159 - protein, 8 aa, Artificial Sequence
  epitope
YSQPQQPI

SEQ ID NO: 2160 - protein, 5 aa, Artificial Sequence
  epitope
SQPQQ

SEQ ID NO: 2161 - protein, 9 aa, Artificial Sequence
  epitope
PQQPISQQQ

SEQ ID NO: 2162 - protein, 6 aa, Artificial Sequence
  epitope
QQPISQ

SEQ ID NO: 2163 - protein, 9 aa, Artificial Sequence
  epitope
SQPQQPISQ

SEQ ID NO: 2164 - protein, 5 aa, Artificial Sequence
  epitope
SQPQQ

SEQ ID NO: 2165 - protein, 10 aa, Artificial Sequence
  epitope
YSQPQQPISQ

SEQ ID NO: 2166 - protein, 8 aa, Artificial Sequence
  epitope
SQPQQPIS

SEQ ID NO: 2167 - protein, 5 aa, Artificial Sequence
  epitope
SQPQQ

SEQ ID NO: 2168 - protein, 15 aa, Artificial Sequence
  epitope
  misc_feature (2)..(11): Xaa can be any naturally occurring amino acid
  misc_feature (15)..(15): Xaa can be any naturally occurring amino acid
YXXXXXXXXXXQQQX

SEQ ID NO: 2169 - protein, 8 aa, Artificial Sequence
  epitope
YSQPQQPI

SEQ ID NO: 2170 - protein, 6 aa, Artificial Sequence
  epitope
SQPQQP

SEQ ID NO: 2171 - protein, 5 aa, Artificial Sequence
  epitope
SQPQQ

SEQ ID NO: 2172 - protein, 10 aa, Artificial Sequence
  epitope
QQPISQQQQQ

SEQ ID NO: 2173 - protein, 10 aa, Artificial Sequence
  epitope
YSQPQQPISQ

SEQ ID NO: 2174 - protein, 6 aa, Artificial Sequence
  epitope
YSQPQQ

SEQ ID NO: 2175 - protein, 5 aa, Artificial Sequence
  epitope
SQPQQ

SEQ ID NO: 2176 - protein, 10 aa, Artificial Sequence
  epitope
YSQPQQPISQ

SEQ ID NO: 2177 - protein, 5 aa, Artificial Sequence
  epitope
SQPQQ

SEQ ID NO: 2178 - protein, 10 aa, Artificial Sequence
  epitope
YSQPQQPISQ

SEQ ID NO: 2179 - protein, 8 aa, Artificial Sequence
  epitope
YSQPQQPI

SEQ ID NO: 2180 - protein, 5 aa, Artificial Sequence
  epitope
SQPQQ

SEQ ID NO: 2181 - protein, 10 aa, Artificial Sequence
  epitope
YSQPQQPISQ

SEQ ID NO: 2182 - protein, 5 aa, Artificial Sequence
  epitope
SQPQQ

SEQ ID NO: 2183 - protein, 4 aa, Artificial Sequence
  epitope
QPQQ

SEQ ID NO: 2184 - protein, 10 aa, Artificial Sequence
  epitope
YSQPQQPISQ

SEQ ID NO: 2185 - protein, 8 aa, Artificial Sequence
  epitope
YSQPQQPI

SEQ ID NO: 2186 - protein, 5 aa, Artificial Sequence
  epitope
SQPQQ

SEQ ID NO: 2187 - protein, 5 aa, Artificial Sequence
  epitope
SQPQQ

SEQ ID NO: 2188 - protein, 15 aa, Artificial Sequence
  epitope
  misc_feature (2)..(2): Xaa can be any naturally occurring amino acid
  misc_feature (4)..(11): Xaa can be any naturally occurring amino acid
  misc_feature (14)..(15): Xaa can be any naturally occurring amino acid
YXQXXXXXXXXQQXX

SEQ ID NO: 2189 - protein, 10 aa, Artificial Sequence
  epitope
YSQPQQPISQ

SEQ ID NO: 2190 - protein, 4 aa, Artificial Sequence
  epitope
QPQQ

SEQ ID NO: 2191 - protein, 5 aa, Artificial Sequence
  epitope
SQPQQ

SEQ ID NO: 2192 - protein, 4 aa, Artificial Sequence
  epitope
QPQQ

SEQ ID NO: 2193 - protein, 5 aa, Artificial Sequence
  epitope
SQPQQ

SEQ ID NO: 2194 - protein, 6 aa, Artificial Sequence
  epitope
YSQPQQ

SEQ ID NO: 2195 - protein, 5 aa, Artificial Sequence
  epitope
SQPQQ

SEQ ID NO: 2196 - protein, 10 aa, Artificial Sequence
  epitope
YSQPQQPISQ

SEQ ID NO: 2197 - protein, 5 aa, Artificial Sequence
  epitope
SQPQQ

SEQ ID NO: 2198 - protein, 5 aa, Artificial Sequence
  epitope
SQPQQ

SEQ ID NO: 2199 - protein, 15 aa, Artificial Sequence
  epitope
  misc_feature (2)..(4): Xaa can be any naturally occurring amino acid
  misc_feature (6)..(10): Xaa can be any naturally occurring amino acid
  misc_feature (14)..(15): Xaa can be any naturally occurring amino acid
YXXXQXXXXXQQQXX

SEQ ID NO: 2200 - protein, 10 aa, Artificial Sequence
  epitope
YSQPQQPISQ

SEQ ID NO: 2201 - protein, 8 aa, Artificial Sequence
  epitope
YSQPQQPI

SEQ ID NO: 2202 - protein, 5 aa, Artificial Sequence
  epitope
SQPQQ

SEQ ID NO: 2203 - protein, 7 aa, Artificial Sequence
  epitope
SQQQQQQ

SEQ ID NO: 2204 - protein, 15 aa, Artificial Sequence
  epitope
  misc_feature (2)..(10): Xaa can be any naturally occurring amino acid
YXXXXXXXXXQQQQQ

SEQ ID NO: 2205 - protein, 9 aa, Artificial Sequence
  epitope
YSQPQQPIS

SEQ ID NO: 2206 - protein, 7 aa, Artificial Sequence
  epitope
SQPQQPI

SEQ ID NO: 2207 - protein, 10 aa, Artificial Sequence
  epitope
QQPISQQQQQ

SEQ ID NO: 2208 - protein, 10 aa, Artificial Sequence
  epitope
  misc_feature (1)..(6): Xaa can be any naturally occurring amino acid
XXXXXXQQQQ

SEQ ID NO: 2209 - protein, 6 aa, Artificial Sequence
  epitope
YSQPQQ

SEQ ID NO: 2210 - protein, 5 aa, Artificial Sequence
  epitope
SQPQQ

SEQ ID NO: 2211 - protein, 10 aa, Artificial Sequence
  epitope
YSQPQQPISQ

SEQ ID NO: 2212 - protein, 5 aa, Artificial Sequence
  epitope
SQPQQ

SEQ ID NO: 2213 - protein, 10 aa, Artificial Sequence
  epitope
YSQPQQPISQ

SEQ ID NO: 2214 - protein, 4 aa, Artificial Sequence
  epitope
QPQQ

SEQ ID NO: 2215 - protein, 9 aa, Artificial Sequence
  epitope
YSQPQQPIS

SEQ ID NO: 2216 - protein, 5 aa, Artificial Sequence
  epitope
SQPQQ

SEQ ID NO: 2217 - protein, 15 aa, Artificial Sequence
  epitope
VSRLLRGIRNYRVAI

SEQ ID NO: 2218 - protein, 10 aa, Artificial Sequence
  epitope
SRLLRGIRNY

SEQ ID NO: 2219 - protein, 8 aa, Artificial Sequence
  epitope
IRNYRVAI

SEQ ID NO: 2220 - protein, 4 aa, Artificial Sequence
  epitope
NYRV

SEQ ID NO: 2221 - protein, 5 aa, Artificial Sequence
  epitope
IRNYR

SEQ ID NO: 2222 - protein, 9 aa, Artificial Sequence
  epitope
RLLRGIRNY

SEQ ID NO: 2223 - protein, 7 aa, Artificial Sequence
  epitope
IRNYRVA

SEQ ID NO: 2224 - protein, 7 aa, Artificial Sequence
  epitope
IRNYRVA

SEQ ID NO: 2225 - protein, 10 aa, Artificial Sequence
  epitope
VSRLLRGIRN

SEQ ID NO: 2226 - protein, 4 aa, Artificial Sequence
  epitope
RNYR

SEQ ID NO: 2227 - protein, 7 aa, Artificial Sequence
  epitope
LLRGIRN

SEQ ID NO: 2228 - protein, 6 aa, Artificial Sequence
  epitope
NYRVAI

SEQ ID NO: 2229 - protein, 15 aa, Artificial Sequence
  epitope
  misc_feature (1)..(5): Xaa can be any naturally occurring amino acid
  misc_feature (9)..(9): Xaa can be any naturally occurring amino acid
  misc_feature (12)..(15): Xaa can be any naturally occurring amino acid
XXXXXRGIXNYXXXX

SEQ ID NO: 2230 - protein, 6 aa, Artificial Sequence
  epitope
IRNYRV

SEQ ID NO: 2231 - protein, 4 aa, Artificial Sequence
  epitope
IRNY

SEQ ID NO: 2232 - protein, 15 aa, Artificial Sequence
  epitope
  misc_feature (1)..(5): Xaa can be any naturally occurring amino acid
  misc_feature (8)..(9): Xaa can be any naturally occurring amino acid
  misc_feature (12)..(14): Xaa can be any naturally occurring amino acid
XXXXXRGXXNYXXXI

SEQ ID NO: 2233 - protein, 8 aa, Artificial Sequence
  epitope
IRNYRVAI

SEQ ID NO: 2234 - protein, 4 aa, Artificial Sequence
  epitope
RNYR

SEQ ID NO: 2235 - protein, 9 aa, Artificial Sequence
  epitope
SRLLRGIRN

SEQ ID NO: 2236 - protein, 8 aa, Artificial Sequence
  epitope
IRNYRVAI

SEQ ID NO: 2237 - protein, 4 aa, Artificial Sequence
  epitope
NYRV

SEQ ID NO: 2238 - protein, 10 aa, Artificial Sequence
  epitope
LLRGIRNYRV

SEQ ID NO: 2239 - protein, 6 aa, Artificial Sequence
  epitope
NYRVAI

SEQ ID NO: 2240 - protein, 8 aa, Artificial Sequence
  epitope
IRNYRVAI

SEQ ID NO: 2241 - protein, 8 aa, Artificial Sequence
  epitope
RLLRGIRN

SEQ ID NO: 2242 - protein, 8 aa, Artificial Sequence
  epitope
IRNYRVAI

SEQ ID NO: 2243 - protein, 9 aa, Artificial Sequence
  epitope
RLLRGIRNY

SEQ ID NO: 2244 - protein, 6 aa, Artificial Sequence
  epitope
RNYRVA

SEQ ID NO: 2245 - protein, 8 aa, Artificial Sequence
  epitope
SRLLRGIR

SEQ ID NO: 2246 - protein, 5 aa, Artificial Sequence
  epitope
SRLLR

SEQ ID NO: 2247 - protein, 10 aa, Artificial Sequence
  epitope
LLRGIRNYRV

SEQ ID NO: 2248 - protein, 8 aa, Artificial Sequence
  epitope
IRNYRVAI

SEQ ID NO: 2249 - protein, 15 aa, Artificial Sequence
  epitope
  misc_feature (1)..(4): Xaa can be any naturally occurring amino acid
  misc_feature (6)..(7): Xaa can be any naturally occurring amino acid
  misc_feature (9)..(9): Xaa can be any naturally occurring amino acid
  misc_feature (12)..(15): Xaa can be any naturally occurring amino acid
XXXXLXXIXNYXXXX

SEQ ID NO: 2250 - protein, 9 aa, Artificial Sequence
  epitope
SRLLRGIRN

SEQ ID NO: 2251 - protein, 8 aa, Artificial Sequence
  epitope
SRLLRGIR

SEQ ID NO: 2252 - protein, 10 aa, Artificial Sequence
  epitope
LLRGIRNYRV

SEQ ID NO: 2253 - protein, 7 aa, Artificial Sequence
  epitope
RNYRVAI

SEQ ID NO: 2254 - protein, 4 aa, Artificial Sequence
  epitope
NYRV

SEQ ID NO: 2255 - protein, 10 aa, Artificial Sequence
  epitope
LLRGIRNYRV

SEQ ID NO: 2256 - protein, 6 aa, Artificial Sequence
  epitope
LRGIRN

SEQ ID NO: 2257 - protein, 9 aa, Artificial Sequence
  epitope
SRLLRGIRN

SEQ ID NO: 2258 - protein, 10 aa, Artificial Sequence
  epitope
LRGIRNYRVA

SEQ ID NO: 2259 - protein, 5 aa, Artificial Sequence
  epitope
RNYRV

SEQ ID NO: 2260 - protein, 5 aa, Artificial Sequence
  epitope
SRLLR

SEQ ID NO: 2261 - protein, 10 aa, Artificial Sequence
  epitope
LLRGIRNYRV

SEQ ID NO: 2262 - protein, 7 aa, Artificial Sequence
  epitope
RNYRVAI

SEQ ID NO: 2263 - protein, 5 aa, Artificial Sequence
  epitope
SRLLR

SEQ ID NO: 2264 - protein, 6 aa, Artificial Sequence
  epitope
NYRVAI

SEQ ID NO: 2265 - protein, 15 aa, Artificial Sequence
  epitope
LGGIDKRVIERFEKE

SEQ ID NO: 2266 - protein, 7 aa, Artificial Sequence
  epitope
GGIDKRV

SEQ ID NO: 2267 - protein, 9 aa, Artificial Sequence
  epitope
KRVIERFEK

SEQ ID NO: 2268 - protein, 5 aa, Artificial Sequence
  epitope
ERFEK

SEQ ID NO: 2269 - protein, 6 aa, Artificial Sequence
  epitope
LGGIDK

SEQ ID NO: 2270 - protein, 10 aa, Artificial Sequence
  epitope
DKRVIERFEK

SEQ ID NO: 2271 - protein, 8 aa, Artificial Sequence
  epitope
LGGIDKRV

SEQ ID NO: 2272 - protein, 10 aa, Artificial Sequence
  epitope
GIDKRVIERF

SEQ ID NO: 2273 - protein, 6 aa, Artificial Sequence
  epitope
GIDKRV

SEQ ID NO: 2274 - protein, 10 aa, Artificial Sequence
  epitope
DKRVIERFEK

SEQ ID NO: 2275 - protein, 9 aa, Artificial Sequence
  epitope
KRVIERFEK

SEQ ID NO: 2276 - protein, 5 aa, Artificial Sequence
  epitope
GGIDK

SEQ ID NO: 2277 - protein, 10 aa, Artificial Sequence
  epitope
DKRVIERFEK

SEQ ID NO: 2278 - protein, 15 aa, Artificial Sequence
  epitope
  misc_feature (2)..(5): Xaa can be any naturally occurring amino acid
  misc_feature (7)..(10): Xaa can be any naturally occurring amino acid
  misc_feature (13)..(13): Xaa can be any naturally occurring amino acid
LXXXXKXXXXRFXKE

SEQ ID NO: 2279 - protein, 6 aa, Artificial Sequence
  epitope
LGGIDK

SEQ ID NO: 2280 - protein, 10 aa, Artificial Sequence
  epitope
DKRVIERFEK

SEQ ID NO: 2281 - protein, 10 aa, Artificial Sequence
  epitope
  misc_feature (1)..(1): Xaa can be any naturally occurring amino acid
  misc_feature (3)..(6): Xaa can be any naturally occurring amino acid
  misc_feature (9)..(9): Xaa can be any naturally occurring amino acid
XKXXXXRFXK

SEQ ID NO: 2282 - protein, 8 aa, Artificial Sequence
  epitope
IDKRVIER

SEQ ID NO: 2283 - protein, 6 aa, Artificial Sequence
  epitope
ERFEKE

SEQ ID NO: 2284 - protein, 6 aa, Artificial Sequence
  epitope
LGGIDK

SEQ ID NO: 2285 - protein, 4 aa, Artificial Sequence
  epitope
GIDK

SEQ ID NO: 2286 - protein, 10 aa, Artificial Sequence
  epitope
DKRVIERFEK

SEQ ID NO: 2287 - protein, 9 aa, Artificial Sequence
  epitope
KRVIERFEK

SEQ ID NO: 2288 - protein, 7 aa, Artificial Sequence
  epitope
KRVIERF

SEQ ID NO: 2289 - protein, 5 aa, Artificial Sequence
  epitope
GGIDK

SEQ ID NO: 2290 - protein, 9 aa, Artificial Sequence
  epitope
DKRVIERFE

SEQ ID NO: 2291 - protein, 6 aa, Artificial Sequence
  epitope
LGGIDK

SEQ ID NO: 2292 - protein, 9 aa, Artificial Sequence
  epitope
KRVIERFEK

SEQ ID NO: 2293 - protein, 4 aa, Artificial Sequence
  epitope
ERFE

SEQ ID NO: 2294 - protein, 10 aa, Artificial Sequence
  epitope
LGGIDKRVIE

SEQ ID NO: 2295 - protein, 8 aa, Artificial Sequence
  epitope
LGGIDKRV

SEQ ID NO: 2296 - protein, 4 aa, Artificial Sequence
  epitope
GIDK

SEQ ID NO: 2297 - protein, 5 aa, Artificial Sequence
  epitope
ERFEK

SEQ ID NO: 2298 - protein, 15 aa, Artificial Sequence
  epitope
  misc_feature (2)..(5): Xaa can be any naturally occurring amino acid
  misc_feature (7)..(10): Xaa can be any naturally occurring amino acid
  misc_feature (12)..(13): Xaa can be any naturally occurring amino acid
  misc_feature (15)..(15): Xaa can be any naturally occurring amino acid
LXXXXKXXXXRXXKX

SEQ ID NO: 2299 - protein, 4 aa, Artificial Sequence
  epitope
GIDK

SEQ ID NO: 2300 - protein, 10 aa, Artificial Sequence
  epitope
DKRVIERFEK

SEQ ID NO: 2301 - protein, 6 aa, Artificial Sequence
  epitope
LGGIDK

SEQ ID NO: 2302 - protein, 10 aa, Artificial Sequence
  epitope
IDKRVIERFE

SEQ ID NO: 2303 - protein, 6 aa, Artificial Sequence
  epitope
LGGIDK

SEQ ID NO: 2304 - protein, 9 aa, Artificial Sequence
  epitope
DKRVIERFE

SEQ ID NO: 2305 - protein, 6 aa, Artificial Sequence
  epitope
LGGIDK

SEQ ID NO: 2306 - protein, 4 aa, Artificial Sequence
  epitope
GIDK

SEQ ID NO: 2307 - protein, 8 aa, Artificial Sequence
  epitope
RVIERFEK

SEQ ID NO: 2308 - protein, 5 aa, Artificial Sequence
  epitope
ERFEK

SEQ ID NO: 2309 - protein, 15 aa, Artificial Sequence
  epitope
QSRYDAIRAIIYSIV

SEQ ID NO: 2310 - protein, 15 aa, Artificial Sequence
  epitope
  misc_feature (1)..(2): Xaa can be any naturally occurring amino acid
  misc_feature (4)..(7): Xaa can be any naturally occurring amino acid
  misc_feature (11)..(11): Xaa can be any naturally occurring amino acid
  misc_feature (13)..(15): Xaa can be any naturally occurring amino acid
XXRXXXXRAIXYXXX

SEQ ID NO: 2311 - protein, 15 aa, Artificial Sequence
  epitope
  misc_feature (1)..(2): Xaa can be any naturally occurring amino acid
  misc_feature (4)..(4): Xaa can be any naturally occurring amino acid
  misc_feature (6)..(7): Xaa can be any naturally occurring amino acid
  misc_feature (9)..(9): Xaa can be any naturally occurring amino acid
  misc_feature (11)..(11): Xaa can be any naturally occurring amino acid
  misc_feature (13)..(15): Xaa can be any naturally occurring amino acid
XXRXDXXRXIXYXXX

SEQ ID NO: 2312 - protein, 15 aa, Artificial Sequence
  epitope
  misc_feature (1)..(2): Xaa can be any naturally occurring amino acid
  misc_feature (6)..(7): Xaa can be any naturally occurring amino acid
  misc_feature (14)..(14): Xaa can be any naturally occurring amino acid
XXRYDXXRAIIYSXV

SEQ ID NO: 2313 - protein, 15 aa, Artificial Sequence
  epitope
  misc_feature (1)..(7): Xaa can be any naturally occurring amino acid
  misc_feature (9)..(9): Xaa can be any naturally occurring amino acid
  misc_feature (11)..(11): Xaa can be any naturally occurring amino acid
  misc_feature (13)..(14): Xaa can be any naturally occurring amino acid
XXXXXXXRXIXYXXV

SEQ ID NO: 2314 - protein, 7 aa, Artificial Sequence
  epitope
SRYDAIR

SEQ ID NO: 2315 - protein, 4 aa, Artificial Sequence
  epitope
IIYS

SEQ ID NO: 2316 - protein, 15 aa, Artificial Sequence
  epitope
  misc_feature (1)..(7): Xaa can be any naturally occurring amino acid
  misc_feature (11)..(11): Xaa can be any naturally occurring amino acid
  misc_feature (13)..(15): Xaa can be any naturally occurring amino acid
XXXXXXXRAIXYXXX

SEQ ID NO: 2317 - protein, 15 aa, Artificial Sequence
  epitope
  misc_feature (1)..(2): Xaa can be any naturally occurring amino acid
  misc_feature (5)..(7): Xaa can be any naturally occurring amino acid
  misc_feature (15)..(15): Xaa can be any naturally occurring amino acid
XXRYXXXRAIIYSIX

SEQ ID NO: 2318 - protein, 15 aa, Artificial Sequence
  epitope
  misc_feature (1)..(7): Xaa can be any naturally occurring amino acid
  misc_feature (11)..(11): Xaa can be any naturally occurring amino acid
  misc_feature (13)..(15): Xaa can be any naturally occurring amino acid
XXXXXXXRAIXYXXX

SEQ ID NO: 2319 - protein, 15 aa, Artificial Sequence
  epitope
  misc_feature (1)..(2): Xaa can be any naturally occurring amino acid
  misc_feature (4)..(7): Xaa can be any naturally occurring amino acid
  misc_feature (9)..(9): Xaa can be any naturally occurring amino acid
  misc_feature (11)..(11): Xaa can be any naturally occurring amino acid
  misc_feature (13)..(15): Xaa can be any naturally occurring amino acid
XXRXXXXRXIXYXXX

SEQ ID NO: 2320 - protein, 15 aa, Artificial Sequence
  epitope
  misc_feature (1)..(2): Xaa can be any naturally occurring amino acid
  misc_feature (4)..(7): Xaa can be any naturally occurring amino acid
  misc_feature (11)..(11): Xaa can be any naturally occurring amino acid
XXRXXXXRAIXYSIV

SEQ ID NO: 2321 - protein, 15 aa, Artificial Sequence
  epitope
  misc_feature (1)..(2): Xaa can be any naturally occurring amino acid
  misc_feature (4)..(7): Xaa can be any naturally occurring amino acid
  misc_feature (11)..(11): Xaa can be any naturally occurring amino acid
XXRXXXXRAIXYSIV

SEQ ID NO: 2322 - protein, 15 aa, Artificial Sequence
  epitope
  misc_feature (1)..(2): Xaa can be any naturally occurring amino acid
  misc_feature (4)..(7): Xaa can be any naturally occurring amino acid
  misc_feature (11)..(11): Xaa can be any naturally occurring amino acid
  misc_feature (13)..(13): Xaa can be any naturally occurring amino acid
  misc_feature (15)..(15): Xaa can be any naturally occurring amino acid
XXRXXXXRAIXYXIX

SEQ ID NO: 2323 - protein, 15 aa, Artificial Sequence
  epitope
  misc_feature (1)..(2): Xaa can be any naturally occurring amino acid
  misc_feature (4)..(7): Xaa can be any naturally occurring amino acid
  misc_feature (11)..(11): Xaa can be any naturally occurring amino acid
  misc_feature (13)..(15): Xaa can be any naturally occurring amino acid
XXRXXXXRAIXYXXX

SEQ ID NO: 2324 - protein, 15 aa, Artificial Sequence
  epitope
  misc_feature (1)..(7): Xaa can be any naturally occurring amino acid
  misc_feature (15)..(15): Xaa can be any naturally occurring amino acid
XXXXXXXRAIIYSIX

SEQ ID NO: 2325 - protein, 15 aa, Artificial Sequence
  epitope
  misc_feature (1)..(7): Xaa can be any naturally occurring amino acid
  misc_feature (15)..(15): Xaa can be any naturally occurring amino acid
XXXXXXXRAIIYSIX

SEQ ID NO: 2326 - protein, 15 aa, Artificial Sequence
  epitope
  misc_feature (1)..(7): Xaa can be any naturally occurring amino acid
  misc_feature (9)..(9): Xaa can be any naturally occurring amino acid
  misc_feature (11)..(11): Xaa can be any naturally occurring amino acid
  misc_feature (13)..(13): Xaa can be any naturally occurring amino acid
  misc_feature (15)..(15): Xaa can be any naturally occurring amino acid
XXXXXXXRXIXYXIX

SEQ ID NO: 2327 - protein, 9 aa, Artificial Sequence
  epitope
RYDAIRAII

SEQ ID NO: 2328 - protein, 5 aa, Artificial Sequence
  epitope
IIYSI

SEQ ID NO: 2329 - protein, 15 aa, Artificial Sequence
  epitope
  misc_feature (1)..(7): Xaa can be any naturally occurring amino acid
  misc_feature (13)..(13): Xaa can be any naturally occurring amino acid
  misc_feature (15)..(15): Xaa can be any naturally occurring amino acid
XXXXXXXRAIIYXIX

SEQ ID NO: 2330 - protein, 5 aa, Artificial Sequence
  epitope
AIRAI

SEQ ID NO: 2331 - protein, 15 aa, Artificial Sequence
  epitope
  misc_feature (1)..(2): Xaa can be any naturally occurring amino acid
  misc_feature (4)..(6): Xaa can be any naturally occurring amino acid
XXRXXXIRAIIYSIV

SEQ ID NO: 2332 - protein, 15 aa, Artificial Sequence
  epitope
  misc_feature (1)..(7): Xaa can be any naturally occurring amino acid
  misc_feature (13)..(13): Xaa can be any naturally occurring amino acid
  misc_feature (15)..(15): Xaa can be any naturally occurring amino acid
XXXXXXXRAIIYXIX

SEQ ID NO: 2333 - protein, 15 aa, Artificial Sequence
  epitope
  misc_feature (1)..(2): Xaa can be any naturally occurring amino acid
  misc_feature (4)..(7): Xaa can be any naturally occurring amino acid
  misc_feature (13)..(13): Xaa can be any naturally occurring amino acid
XXRXXXXRAIIYXIV

SEQ ID NO: 2334 - protein, 15 aa, Artificial Sequence
  epitope
  misc_feature (1)..(7): Xaa can be any naturally occurring amino acid
  misc_feature (13)..(13): Xaa can be any naturally occurring amino acid
XXXXXXXRAIIYXIV

SEQ ID NO: 2335 - protein, 15 aa, Artificial Sequence
  epitope
  misc_feature (1)..(2): Xaa can be any naturally occurring amino acid
  misc_feature (4)..(7): Xaa can be any naturally occurring amino acid
XXRXXXXRAIIYSIV

SEQ ID NO: 2336 - protein, 15 aa, Artificial Sequence
  epitope
  misc_feature (1)..(7): Xaa can be any naturally occurring amino acid
  misc_feature (15)..(15): Xaa can be any naturally occurring amino acid
XXXXXXXRAIIYSIX

SEQ ID NO: 2337 - protein, 15 aa, Artificial Sequence
  epitope
  misc_feature (1)..(2): Xaa can be any naturally occurring amino acid
  misc_feature (4)..(7): Xaa can be any naturally occurring amino acid
  misc_feature (15)..(15): Xaa can be any naturally occurring amino acid
XXRXXXXRAIIYSIX

SEQ ID NO: 2338 - protein, 15 aa, Artificial Sequence
  epitope
  misc_feature (1)..(7): Xaa can be any naturally occurring amino acid
  misc_feature (11)..(11): Xaa can be any naturally occurring amino acid
  misc_feature (13)..(13): Xaa can be any naturally occurring amino acid
  misc_feature (15)..(15): Xaa can be any naturally occurring amino acid
XXXXXXXRAIXYXIX

SEQ ID NO: 2339 - protein, 5 aa, Artificial Sequence
  epitope
AIIYS

SEQ ID NO: 2340 - protein, 15 aa, Artificial Sequence
  epitope
  misc_feature (1)..(7): Xaa can be any naturally occurring amino acid
  misc_feature (13)..(15): Xaa can be any naturally occurring amino acid
XXXXXXXRAIIYXXX

SEQ ID NO: 2341 - protein, 15 aa, Artificial Sequence
  epitope
  misc_feature (1)..(7): Xaa can be any naturally occurring amino acid
  misc_feature (13)..(13): Xaa can be any naturally occurring amino acid
  misc_feature (15)..(15): Xaa can be any naturally occurring amino acid
XXXXXXXRAIIYXIX

SEQ ID NO: 2342 - protein, 15 aa, Artificial Sequence
  epitope
HDIDRCAYVTEIVLA

SEQ ID NO: 2343 - protein, 15 aa, Artificial Sequence
  epitope
  misc_feature (1)..(1): Xaa can be any naturally occurring amino acid
  misc_feature (3)..(5): Xaa can be any naturally occurring amino acid
  misc_feature (7)..(7): Xaa can be any naturally occurring amino acid
  misc_feature (9)..(11): Xaa can be any naturally occurring amino acid
XDXXXCXYXXXIVLA

SEQ ID NO: 2344 - protein, 8 aa, Artificial Sequence
  epitope
HDIDRCAY

SEQ ID NO: 2345 - protein, 7 aa, Artificial Sequence
  epitope
YVTEIVL

SEQ ID NO: 2346 - protein, 6 aa, Artificial Sequence
  epitope
YVTEIV

SEQ ID NO: 2347 - protein, 4 aa, Artificial Sequence
  epitope
VTEI

SEQ ID NO: 2348 - protein, 15 aa, Artificial Sequence
  epitope
  misc_feature (1)..(4): Xaa can be any naturally occurring amino acid
  misc_feature (11)..(11): Xaa can be any naturally occurring amino acid
XXXXRCAYVTXIVLA

SEQ ID NO: 2349 - protein, 15 aa, Artificial Sequence
  epitope
  misc_feature (1)..(5): Xaa can be any naturally occurring amino acid
  misc_feature (7)..(7): Xaa can be any naturally occurring amino acid
  misc_feature (9)..(11): Xaa can be any naturally occurring amino acid
XXXXXCXYXXXIVLA

SEQ ID NO: 2350 - protein, 7 aa, Artificial Sequence
  epitope
YVTEIVL

SEQ ID NO: 2351 - protein, 7 aa, Artificial Sequence
  epitope
  misc_feature (4)..(4): Xaa can be any naturally occurring amino acid
YVTXIVL

SEQ ID NO: 2352 - protein, 7 aa, Artificial Sequence
  epitope
  misc_feature (2)..(4): Xaa can be any naturally occurring amino acid
YXXXIVL

SEQ ID NO: 2353 - protein, 15 aa, Artificial Sequence
  epitope
  misc_feature (1)..(3): Xaa can be any naturally occurring amino acid
  misc_feature (11)..(11): Xaa can be any naturally occurring amino acid
XXXDRCAYVTXIVLA

SEQ ID NO: 2354 - protein, 15 aa, Artificial Sequence
  epitope
  misc_feature (1)..(5): Xaa can be any naturally occurring amino acid
  misc_feature (7)..(7): Xaa can be any naturally occurring amino acid
  misc_feature (11)..(11): Xaa can be any naturally occurring amino acid
XXXXXCXYVTXIVLA

SEQ ID NO: 2355 - protein, 15 aa, Artificial Sequence
  epitope
  misc_feature (1)..(5): Xaa can be any naturally occurring amino acid
  misc_feature (7)..(7): Xaa can be any naturally occurring amino acid
  misc_feature (9)..(11): Xaa can be any naturally occurring amino acid
  misc_feature (15)..(15): Xaa can be any naturally occurring amino acid
XXXXXCXYXXXIVLX

SEQ ID NO: 2356 - protein, 6 aa, Artificial Sequence
  epitope
YVTEIV

SEQ ID NO: 2357 - protein, 8 aa, Artificial Sequence
  epitope
HDIDRCAY

SEQ ID NO: 2358 - protein, 4 aa, Artificial Sequence
  epitope
TEIV

SEQ ID NO: 2359 - protein, 15 aa, Artificial Sequence
  epitope
  misc_feature (1)..(3): Xaa can be any naturally occurring amino acid
  misc_feature (7)..(7): Xaa can be any naturally occurring amino acid
  misc_feature (11)..(11): Xaa can be any naturally occurring amino acid
XXXDRCXYVTXIVLA

SEQ ID NO: 2360 - protein, 15 aa, Artificial Sequence
  epitope
  misc_feature (1)..(5): Xaa can be any naturally occurring amino acid
  misc_feature (7)..(7): Xaa can be any naturally occurring amino acid
  misc_feature (9)..(9): Xaa can be any naturally occurring amino acid
  misc_feature (11)..(11): Xaa can be any naturally occurring amino acid
XXXXXCXYXTXIVLA

SEQ ID NO: 2361 - protein, 15 aa, Artificial Sequence
  epitope
  misc_feature (1)..(7): Xaa can be any naturally occurring amino acid
  misc_feature (9)..(11): Xaa can be any naturally occurring amino acid
  misc_feature (15)..(15): Xaa can be any naturally occurring amino acid
XXXXXXXYXXXIVLX

SEQ ID NO: 2362 - protein, 5 aa, Artificial Sequence
  epitope
VTEIV

SEQ ID NO: 2363 - protein, 15 aa, Artificial Sequence
  epitope
  misc_feature (1)..(7): Xaa can be any naturally occurring amino acid
  misc_feature (9)..(12): Xaa can be any naturally occurring amino acid
XXXXXXXYXXXXVLA

SEQ ID NO: 2364 - protein, 15 aa, Artificial Sequence
  epitope
  misc_feature (1)..(5): Xaa can be any naturally occurring amino acid
  misc_feature (11)..(11): Xaa can be any naturally occurring amino acid
XXXXXCAYVTXIVLA

SEQ ID NO: 2365 - protein, 15 aa, Artificial Sequence
  epitope
  misc_feature (1)..(5): Xaa can be any naturally occurring amino acid
  misc_feature (7)..(7): Xaa can be any naturally occurring amino acid
  misc_feature (10)..(11): Xaa can be any naturally occurring amino acid
XXXXXCXYVXXIVLA

SEQ ID NO: 2366 - protein, 15 aa, Artificial Sequence
  epitope
  misc_feature (1)..(7): Xaa can be any naturally occurring amino acid
  misc_feature (9)..(11): Xaa can be any naturally occurring amino acid
  misc_feature (15)..(15): Xaa can be any naturally occurring amino acid
XXXXXXXYXXXIVLX

SEQ ID NO: 2367 - protein, 5 aa, Artificial Sequence
  epitope
VTEIV

SEQ ID NO: 2368 - protein, 5 aa, Artificial Sequence
  epitope
  misc_feature (3)..(3): Xaa can be any naturally occurring amino acid
VTXIV

SEQ ID NO: 2369 - protein, 15 aa, Artificial Sequence
  epitope
  misc_feature (1)..(5): Xaa can be any naturally occurring amino acid
  misc_feature (7)..(7): Xaa can be any naturally occurring amino acid
  misc_feature (9)..(9): Xaa can be any naturally occurring amino acid
  misc_feature (11)..(11): Xaa can be any naturally occurring amino acid
XXXXXCXYXTXIVLA

SEQ ID NO: 2370 - protein, 15 aa, Artificial Sequence
  epitope
  misc_feature (1)..(7): Xaa can be any naturally occurring amino acid
  misc_feature (9)..(9): Xaa can be any naturally occurring amino acid
  misc_feature (11)..(11): Xaa can be any naturally occurring amino acid
  misc_feature (15)..(15): Xaa can be any naturally occurring amino acid
XXXXXXXYXTXIVLX

SEQ ID NO: 2371 - protein, 8 aa, Artificial Sequence
  epitope
HDIDRCAY

SEQ ID NO: 2372 - protein, 5 aa, Artificial Sequence
  epitope
TEIVL

SEQ ID NO: 2373 - protein, 4 aa, Artificial Sequence
  epitope
TEIV

SEQ ID NO: 2374 - protein, 15 aa, Artificial Sequence
  epitope
  misc_feature (1)..(3): Xaa can be any naturally occurring amino acid
  misc_feature (9)..(9): Xaa can be any naturally occurring amino acid
  misc_feature (11)..(11): Xaa can be any naturally occurring amino acid
XXXDRCAYXTXIVLA

SEQ ID NO: 2375 - protein, 15 aa, Artificial Sequence
  epitope
  misc_feature (1)..(5): Xaa can be any naturally occurring amino acid
  misc_feature (7)..(7): Xaa can be any naturally occurring amino acid
  misc_feature (9)..(11): Xaa can be any naturally occurring amino acid
XXXXXCXYXXXIVLA

SEQ ID NO: 2376 - protein, 7 aa, Artificial Sequence
  epitope
AYVTEIV

SEQ ID NO: 2377 - protein, 6 aa, Artificial Sequence
  epitope
YVTEIV

SEQ ID NO: 2378 - protein, 15 aa, Artificial Sequence
  epitope
  misc_feature (1)..(5): Xaa can be any naturally occurring amino acid
  misc_feature (9)..(11): Xaa can be any naturally occurring amino acid
  misc_feature (15)..(15): Xaa can be any naturally occurring amino acid
XXXXXCAYXXXIVLX

SEQ ID NO: 2379 - protein, 8 aa, Artificial Sequence
  epitope
HDIDRCAY

SEQ ID NO: 2380 - protein, 10 aa, Artificial Sequence
  epitope
DRCAYVTEIV

SEQ ID NO: 2381 - protein, 15 aa, Artificial Sequence
  epitope
  misc_feature (1)..(5): Xaa can be any naturally occurring amino acid
  misc_feature (7)..(7): Xaa can be any naturally occurring amino acid
  misc_feature (9)..(9): Xaa can be any naturally occurring amino acid
  misc_feature (11)..(11): Xaa can be any naturally occurring amino acid
XXXXXCXYXTXIVLA

SEQ ID NO: 2382 - protein, 15 aa, Artificial Sequence
  epitope
  misc_feature (1)..(7): Xaa can be any naturally occurring amino acid
  misc_feature (9)..(11): Xaa can be any naturally occurring amino acid
  misc_feature (15)..(15): Xaa can be any naturally occurring amino acid
XXXXXXXYXXXIVLX

SEQ ID NO: 2383 - protein, 8 aa, Artificial Sequence
  epitope
HDIDRCAY

SEQ ID NO: 2384 - protein, 7 aa, Artificial Sequence
  epitope
YVTEIVL

SEQ ID NO: 2385 - protein, 4 aa, Artificial Sequence
  epitope
VTEI

SEQ ID NO: 2386 - protein, 15 aa, Artificial Sequence
  epitope
  misc_feature (2)..(5): Xaa can be any naturally occurring amino acid
  misc_feature (7)..(7): Xaa can be any naturally occurring amino acid
  misc_feature (9)..(11): Xaa can be any naturally occurring amino acid
HXXXXCXYXXXIVLA

SEQ ID NO: 2387 - protein, 15 aa, Artificial Sequence
  epitope
  misc_feature (1)..(7): Xaa can be any naturally occurring amino acid
  misc_feature (9)..(11): Xaa can be any naturally occurring amino acid
XXXXXXXYXXXIVLA

SEQ ID NO: 2388 - protein, 9 aa, Artificial Sequence
  epitope
RCAYVTEIV

SEQ ID NO: 2389 - protein, 15 aa, Artificial Sequence
  epitope
  misc_feature (1)..(4): Xaa can be any naturally occurring amino acid
  misc_feature (7)..(7): Xaa can be any naturally occurring amino acid
  misc_feature (11)..(11): Xaa can be any naturally occurring amino acid
XXXXRCXYVTXIVLA

SEQ ID NO: 2390 - protein, 5 aa, Artificial Sequence
  epitope
VTEIV

SEQ ID NO: 2391 - protein, 15 aa, Artificial Sequence
  epitope
  misc_feature (1)..(1): Xaa can be any naturally occurring amino acid
  misc_feature (11)..(11): Xaa can be any naturally occurring amino acid
XDIDRCAYVTXIVLA

SEQ ID NO: 2392 - protein, 15 aa, Artificial Sequence
  epitope
  misc_feature (1)..(4): Xaa can be any naturally occurring amino acid
  misc_feature (7)..(7): Xaa can be any naturally occurring amino acid
  misc_feature (9)..(12): Xaa can be any naturally occurring amino acid
XXXXRCXYXXXXVLA

SEQ ID NO: 2393 - protein, 10 aa, Artificial Sequence
  epitope
PHDIDRCAYV

SEQ ID NO: 2394 - protein, 9 aa, Artificial Sequence
  epitope
HDIDRCAYV

SEQ ID NO: 2395 - protein, 4 aa, Artificial Sequence
  epitope
TEIV

SEQ ID NO: 2396 - protein, 15 aa, Artificial Sequence
  epitope
  misc_feature (1)..(1): Xaa can be any naturally occurring amino acid
  misc_feature (3)..(5): Xaa can be any naturally occurring amino acid
  misc_feature (7)..(7): Xaa can be any naturally occurring amino acid
  misc_feature (9)..(11): Xaa can be any naturally occurring amino acid
XDXXXCXYXXXIVLA

SEQ ID NO: 2397 - protein, 15 aa, Artificial Sequence
  epitope
  misc_feature (1)..(5): Xaa can be any naturally occurring amino acid
  misc_feature (7)..(7): Xaa can be any naturally occurring amino acid
  misc_feature (9)..(12): Xaa can be any naturally occurring amino acid
  misc_feature (15)..(15): Xaa can be any naturally occurring amino acid
XXXXXCXYXXXXVLX

SEQ ID NO: 2398 - protein, 5 aa, Artificial Sequence
  epitope
TEIVL

SEQ ID NO: 2399 - protein, 4 aa, Artificial Sequence
  epitope
TEIV

SEQ ID NO: 2400 - protein, 15 aa, Artificial Sequence
  epitope
  misc_feature (1)..(3): Xaa can be any naturally occurring amino acid
  misc_feature (5)..(5): Xaa can be any naturally occurring amino acid
  misc_feature (7)..(7): Xaa can be any naturally occurring amino acid
  misc_feature (9)..(9): Xaa can be any naturally occurring amino acid
  misc_feature (11)..(11): Xaa can be any naturally occurring amino acid
XXXDXCXYXTXIVLA

SEQ ID NO: 2401 - protein, 5 aa, Artificial Sequence
  epitope
VTEIV

SEQ ID NO: 2402 - protein, 4 aa, Artificial Sequence
  epitope
TEIV

SEQ ID NO: 2403 - protein, 15 aa, Artificial Sequence
  epitope
  misc_feature (1)..(1): Xaa can be any naturally occurring amino acid
  misc_feature (4)..(4): Xaa can be any naturally occurring amino acid
  misc_feature (9)..(9): Xaa can be any naturally occurring amino acid
  misc_feature (11)..(11): Xaa can be any naturally occurring amino acid
XDIXRCAYXTXIVLA

SEQ ID NO: 2404 - protein, 15 aa, Artificial Sequence
  epitope
  misc_feature (1)..(1): Xaa can be any naturally occurring amino acid
  misc_feature (3)..(7): Xaa can be any naturally occurring amino acid
  misc_feature (9)..(11): Xaa can be any naturally occurring amino acid
XDXXXXXYXXXIVLA

SEQ ID NO: 2405 - protein, 10 aa, Artificial Sequence
  epitope
RCAYVTEIVL

SEQ ID NO: 2406 - protein, 5 aa, Artificial Sequence
  epitope
TEIVL

SEQ ID NO: 2407 - protein, 5 aa, Artificial Sequence
  epitope
  misc_feature (2)..(2): Xaa can be any naturally occurring amino acid
TXIVL

SEQ ID NO: 2408 - protein, 15 aa, Artificial Sequence
  epitope
  misc_feature (11)..(11): Xaa can be any naturally occurring amino acid
HDIDRCAYVTXIVLA

SEQ ID NO: 2409 - protein, 15 aa, Artificial Sequence
  epitope
  misc_feature (1)..(1): Xaa can be any naturally occurring amino acid
  misc_feature (9)..(11): Xaa can be any naturally occurring amino acid
XDIDRCAYXXXIVLA

SEQ ID NO: 2410 - protein, 15 aa, Artificial Sequence
  epitope
  misc_feature (1)..(1): Xaa can be any naturally occurring amino acid
  misc_feature (4)..(4): Xaa can be any naturally occurring amino acid
  misc_feature (7)..(7): Xaa can be any naturally occurring amino acid
  misc_feature (9)..(11): Xaa can be any naturally occurring amino acid
  misc_feature (15)..(15): Xaa can be any naturally occurring amino acid
XDIXRCXYXXXIVLX

SEQ ID NO: 2411 - protein, 5 aa, Artificial Sequence
  epitope
TEIVL

SEQ ID NO: 2412 - protein, 5 aa, Artificial Sequence
  epitope
  misc_feature (2)..(2): Xaa can be any naturally occurring amino acid
TXIVL

SEQ ID NO: 2413 - protein, 15 aa, Artificial Sequence
  epitope
  misc_feature (1)..(2): Xaa can be any naturally occurring amino acid
  misc_feature (4)..(5): Xaa can be any naturally occurring amino acid
  misc_feature (7)..(7): Xaa can be any naturally occurring amino acid
  misc_feature (10)..(11): Xaa can be any naturally occurring amino acid
  misc_feature (15)..(15): Xaa can be any naturally occurring amino acid
XXIXXCXYVXXIVLX

SEQ ID NO: 2414 - protein, 15 aa, Artificial Sequence
  epitope
  misc_feature (1)..(2): Xaa can be any naturally occurring amino acid
  misc_feature (4)..(7): Xaa can be any naturally occurring amino acid
  misc_feature (9)..(12): Xaa can be any naturally occurring amino acid
  misc_feature (15)..(15): Xaa can be any naturally occurring amino acid
XXIXXXXYXXXXVLX

SEQ ID NO: 2415 - protein, 7 aa, Artificial Sequence
  epitope
IDRCAYV

SEQ ID NO: 2416 - protein, 7 aa, Artificial Sequence
  epitope
  misc_feature (2)..(3): Xaa can be any naturally occurring amino acid
  misc_feature (5)..(5): Xaa can be any naturally occurring amino acid
IXXCXYV

SEQ ID NO: 2417 - protein, 10 aa, Artificial Sequence
  epitope
RCAYVTEIVL

SEQ ID NO: 2418 - protein, 5 aa, Artificial Sequence
  epitope
TEIVL

SEQ ID NO: 2419 - protein, 15 aa, Artificial Sequence
  epitope
QSTLKAWSGKTENEE

SEQ ID NO: 2420 - protein, 15 aa, Artificial Sequence
  epitope
  misc_feature (1)..(2): Xaa can be any naturally occurring amino acid
  misc_feature (4)..(4): Xaa can be any naturally occurring amino acid
  misc_feature (6)..(6): Xaa can be any naturally occurring amino acid
  misc_feature (12)..(13): Xaa can be any naturally occurring amino acid
  misc_feature (15)..(15): Xaa can be any naturally occurring amino acid
XXTXKXWSGKTXXEX

SEQ ID NO: 2421 - protein, 15 aa, Artificial Sequence
  epitope
  misc_feature (1)..(4): Xaa can be any naturally occurring amino acid
  misc_feature (6)..(6): Xaa can be any naturally occurring amino acid
  misc_feature (8)..(8): Xaa can be any naturally occurring amino acid
  misc_feature (12)..(13): Xaa can be any naturally occurring amino acid
  misc_feature (15)..(15): Xaa can be any naturally occurring amino acid
XXXXKXWXGKTXXEX

SEQ ID NO: 2422 - protein, 15 aa, Artificial Sequence
  epitope
  misc_feature (1)..(6): Xaa can be any naturally occurring amino acid
  misc_feature (8)..(8): Xaa can be any naturally occurring amino acid
  misc_feature (12)..(13): Xaa can be any naturally occurring amino acid
  misc_feature (15)..(15): Xaa can be any naturally occurring amino acid
XXXXXXWXGKTXXEX

SEQ ID NO: 2423 - protein, 8 aa, Artificial Sequence
  epitope
AWSGKTEN

SEQ ID NO: 2424 - protein, 5 aa, Artificial Sequence
  epitope
AWSGK

SEQ ID NO: 2425 - protein, 5 aa, Artificial Sequence
  epitope
  misc_feature (1)..(1): Xaa can be any naturally occurring amino acid
XWSGK

SEQ ID NO: 2426 - protein, 15 aa, Artificial Sequence
  epitope
  misc_feature (6)..(6): Xaa can be any naturally occurring amino acid
  misc_feature (12)..(15): Xaa can be any naturally occurring amino acid
QSTLKXWSGKTXXXX

SEQ ID NO: 2427 - protein, 15 aa, Artificial Sequence
  epitope
  misc_feature (1)..(2): Xaa can be any naturally occurring amino acid
  misc_feature (6)..(6): Xaa can be any naturally occurring amino acid
  misc_feature (8)..(8): Xaa can be any naturally occurring amino acid
  misc_feature (12)..(15): Xaa can be any naturally occurring amino acid
XXTLKXWXGKTXXXX

SEQ ID NO: 2428 - protein, 15 aa, Artificial Sequence
  epitope
  misc_feature (4)..(4): Xaa can be any naturally occurring amino acid
  misc_feature (6)..(6): Xaa can be any naturally occurring amino acid
  misc_feature (8)..(8): Xaa can be any naturally occurring amino acid
  misc_feature (12)..(15): Xaa can be any naturally occurring amino acid
QSTXKXWXGKTXXXX

SEQ ID NO: 2429 - protein, 15 aa, Artificial Sequence
  epitope
  misc_feature (1)..(2): Xaa can be any naturally occurring amino acid
  misc_feature (4)..(4): Xaa can be any naturally occurring amino acid
  misc_feature (6)..(9): Xaa can be any naturally occurring amino acid
  misc_feature (12)..(15): Xaa can be any naturally occurring amino acid
XXTXKXXXXKTXXXX

SEQ ID NO: 2430 - protein, 15 aa, Artificial Sequence
  epitope
  misc_feature (8)..(9): Xaa can be any naturally occurring amino acid
  misc_feature (12)..(12): Xaa can be any naturally occurring amino acid
  misc_feature (15)..(15): Xaa can be any naturally occurring amino acid
QSTLKAWXXKTXNEX

SEQ ID NO: 2431 - protein, 15 aa, Artificial Sequence
  epitope
  misc_feature (1)..(3): Xaa can be any naturally occurring amino acid
  misc_feature (8)..(9): Xaa can be any naturally occurring amino acid
  misc_feature (12)..(15): Xaa can be any naturally occurring amino acid
XXXLKAWXXKTXXXX

SEQ ID NO: 2432 - protein, 10 aa, Artificial Sequence
  epitope
QSTLKAWSGK

SEQ ID NO: 2433 - protein, 10 aa, Artificial Sequence
  epitope
  misc_feature (8)..(9): Xaa can be any naturally occurring amino acid
QSTLKAWXXK

SEQ ID NO: 2434 - protein, 10 aa, Artificial Sequence
  epitope
  misc_feature (1)..(3): Xaa can be any naturally occurring amino acid
  misc_feature (8)..(9): Xaa can be any naturally occurring amino acid
XXXLKAWXXK

SEQ ID NO: 2435 - protein, 9 aa, Artificial Sequence
  epitope
KAWSGKTEN

SEQ ID NO: 2436 - protein, 6 aa, Artificial Sequence
  epitope
WSGKTE

SEQ ID NO: 2437 - protein, 15 aa, Artificial Sequence
  epitope
  misc_feature (4)..(4): Xaa can be any naturally occurring amino acid
  misc_feature (12)..(15): Xaa can be any naturally occurring amino acid
QSTXKAWSGKTXXXX

SEQ ID NO: 2438 - protein, 15 aa, Artificial Sequence
  epitope
  misc_feature (1)..(3): Xaa can be any naturally occurring amino acid
  misc_feature (12)..(15): Xaa can be any naturally occurring amino acid
XXXLKAWSGKTXXXX

SEQ ID NO: 2439 - protein, 15 aa, Artificial Sequence
  epitope
  misc_feature (1)..(4): Xaa can be any naturally occurring amino acid
  misc_feature (12)..(15): Xaa can be any naturally occurring amino acid
XXXXKAWSGKTXXXX

SEQ ID NO: 2440 - protein, 15 aa, Artificial Sequence
  epitope
  misc_feature (1)..(5): Xaa can be any naturally occurring amino acid
  misc_feature (8)..(9): Xaa can be any naturally occurring amino acid
  misc_feature (12)..(15): Xaa can be any naturally occurring amino acid
XXXXXAWXXKTXXXX

SEQ ID NO: 2441 - protein, 6 aa, Artificial Sequence
  epitope
KAWSGK

SEQ ID NO: 2442 - protein, 15 aa, Artificial Sequence
  epitope
  misc_feature (1)..(4): Xaa can be any naturally occurring amino acid
  misc_feature (6)..(6): Xaa can be any naturally occurring amino acid
  misc_feature (12)..(15): Xaa can be any naturally occurring amino acid
XXXXKXWSGKTXXXX

SEQ ID NO: 2443 - protein, 15 aa, Artificial Sequence
  epitope
  misc_feature (1)..(1): Xaa can be any naturally occurring amino acid
  misc_feature (12)..(15): Xaa can be any naturally occurring amino acid
XSTLKAWSGKTXXXX

SEQ ID NO: 2444 - protein, 15 aa, Artificial Sequence
  epitope
  misc_feature (1)..(4): Xaa can be any naturally occurring amino acid
  misc_feature (12)..(15): Xaa can be any naturally occurring amino acid
XXXXKAWSGKTXXXX

SEQ ID NO: 2445 - protein, 15 aa, Artificial Sequence
  epitope
  misc_feature (1)..(6): Xaa can be any naturally occurring amino acid
  misc_feature (12)..(15): Xaa can be any naturally occurring amino acid
XXXXXXWSGKTXXXX

SEQ ID NO: 2446 - protein, 15 aa, Artificial Sequence
  epitope
  misc_feature (1)..(1): Xaa can be any naturally occurring amino acid
  misc_feature (8)..(9): Xaa can be any naturally occurring amino acid
  misc_feature (12)..(15): Xaa can be any naturally occurring amino acid
XSTLKAWXXKTXXXX

SEQ ID NO: 2447 - protein, 15 aa, Artificial Sequence
  epitope
  misc_feature (1)..(4): Xaa can be any naturally occurring amino acid
  misc_feature (6)..(6): Xaa can be any naturally occurring amino acid
  misc_feature (8)..(9): Xaa can be any naturally occurring amino acid
  misc_feature (12)..(15): Xaa can be any naturally occurring amino acid
XXXXKXWXXKTXXXX

SEQ ID NO: 2448 - protein, 15 aa, Artificial Sequence
  epitope
  misc_feature (12)..(15): Xaa can be any naturally occurring amino acid
QSTLKAWSGKTXXXX

SEQ ID NO: 2449 - protein, 15 aa, Artificial Sequence
  epitope
  misc_feature (1)..(1): Xaa can be any naturally occurring amino acid
  misc_feature (3)..(3): Xaa can be any naturally occurring amino acid
  misc_feature (12)..(15): Xaa can be any naturally occurring amino acid
XSXLKAWSGKTXXXX

SEQ ID NO: 2450 - protein, 15 aa, Artificial Sequence
  epitope
  misc_feature (1)..(3): Xaa can be any naturally occurring amino acid
  misc_feature (8)..(8): Xaa can be any naturally occurring amino acid
  misc_feature (12)..(15): Xaa can be any naturally occurring amino acid
XXXLKAWXGKTXXXX

SEQ ID NO: 2451 - protein, 15 aa, Artificial Sequence
  epitope
  misc_feature (1)..(1): Xaa can be any naturally occurring amino acid
  misc_feature (3)..(3): Xaa can be any naturally occurring amino acid
  misc_feature (9)..(9): Xaa can be any naturally occurring amino acid
  misc_feature (15)..(15): Xaa can be any naturally occurring amino acid
XSXLKAWSXKTENEX

SEQ ID NO: 2452 - protein, 15 aa, Artificial Sequence
  epitope
  misc_feature (1)..(4): Xaa can be any naturally occurring amino acid
  misc_feature (6)..(6): Xaa can be any naturally occurring amino acid
  misc_feature (8)..(9): Xaa can be any naturally occurring amino acid
  misc_feature (12)..(12): Xaa can be any naturally occurring amino acid
  misc_feature (14)..(15): Xaa can be any naturally occurring amino acid
XXXXKXWXXKTXNXX

SEQ ID NO: 2453 - protein, 7 aa, Artificial Sequence
  epitope
LKAWSGK

SEQ ID NO: 2454 - protein, 7 aa, Artificial Sequence
  epitope
  misc_feature (6)..(6): Xaa can be any naturally occurring amino acid
LKAWSXK

SEQ ID NO: 2455 - protein, 15 aa, Artificial Sequence
  epitope
  misc_feature (12)..(15): Xaa can be any naturally occurring amino acid
QSTLKAWSGKTXXXX

SEQ ID NO: 2456 - protein, 15 aa, Artificial Sequence
  epitope
  misc_feature (6)..(6): Xaa can be any naturally occurring amino acid
  misc_feature (12)..(15): Xaa can be any naturally occurring amino acid
QSTLKXWSGKTXXXX

SEQ ID NO: 2457 - protein, 15 aa, Artificial Sequence
  epitope
  misc_feature (1)..(3): Xaa can be any naturally occurring amino acid
  misc_feature (8)..(8): Xaa can be any naturally occurring amino acid
  misc_feature (12)..(12): Xaa can be any naturally occurring amino acid
  misc_feature (14)..(14): Xaa can be any naturally occurring amino acid
XXXLKAWXGKTXNXE

SEQ ID NO: 2458 - protein, 15 aa, Artificial Sequence
  epitope
  misc_feature (1)..(3): Xaa can be any naturally occurring amino acid
  misc_feature (8)..(9): Xaa can be any naturally occurring amino acid
  misc_feature (12)..(12): Xaa can be any naturally occurring amino acid
  misc_feature (14)..(15): Xaa can be any naturally occurring amino acid
XXXLKAWXXKTXNXX

SEQ ID NO: 2459 - protein, 15 aa, Artificial Sequence
  epitope
  misc_feature (1)..(3): Xaa can be any naturally occurring amino acid
  misc_feature (8)..(9): Xaa can be any naturally occurring amino acid
  misc_feature (12)..(15): Xaa can be any naturally occurring amino acid
XXXLKAWXXKTXXXX

SEQ ID NO: 2460 - protein, 7 aa, Artificial Sequence
  epitope
LKAWSGK

SEQ ID NO: 2461 - protein, 6 aa, Artificial Sequence
  epitope
LKAWSG

SEQ ID NO: 2462 - protein, 6 aa, Artificial Sequence
  epitope
  misc_feature (5)..(5): Xaa can be any naturally occurring amino acid
LKAWXG

SEQ ID NO: 2463 - protein, 6 aa, Artificial Sequence
  epitope
  misc_feature (5)..(6): Xaa can be any naturally occurring amino acid
LKAWXX

SEQ ID NO: 2464 - protein, 9 aa, Artificial Sequence
  epitope
WSGKTENEE

SEQ ID NO: 2465 - protein, 9 aa, Artificial Sequence
  epitope
  misc_feature (2)..(2): Xaa can be any naturally occurring amino acid
  misc_feature (6)..(6): Xaa can be any naturally occurring amino acid
  misc_feature (8)..(8): Xaa can be any naturally occurring amino acid
WXGKTXNXE

SEQ ID NO: 2466 - protein, 9 aa, Artificial Sequence
  epitope
  misc_feature (2)..(3): Xaa can be any naturally occurring amino acid
  misc_feature (6)..(6): Xaa can be any naturally occurring amino acid
  misc_feature (8)..(9): Xaa can be any naturally occurring amino acid
WXXKTXNXX

SEQ ID NO: 2467 - protein, 15 aa, Artificial Sequence
  epitope
  misc_feature (6)..(6): Xaa can be any naturally occurring amino acid
  misc_feature (13)..(13): Xaa can be any naturally occurring amino acid
QSTLKXWSGKTEXEE

SEQ ID NO: 2468 - protein, 15 aa, Artificial Sequence
  epitope
  misc_feature (1)..(1): Xaa can be any naturally occurring amino acid
  misc_feature (5)..(6): Xaa can be any naturally occurring amino acid
  misc_feature (8)..(9): Xaa can be any naturally occurring amino acid
  misc_feature (13)..(13): Xaa can be any naturally occurring amino acid
  misc_feature (15)..(15): Xaa can be any naturally occurring amino acid
XSTLXXWXXKTEXEX

SEQ ID NO: 2469 - protein, 15 aa, Artificial Sequence
  epitope
  misc_feature (1)..(1): Xaa can be any naturally occurring amino acid
  misc_feature (3)..(3): Xaa can be any naturally occurring amino acid
  misc_feature (5)..(6): Xaa can be any naturally occurring amino acid
  misc_feature (8)..(9): Xaa can be any naturally occurring amino acid
  misc_feature (13)..(15): Xaa can be any naturally occurring amino acid
XSXLXXWXXKTEXXX

SEQ ID NO: 2470 - protein, 7 aa, Artificial Sequence
  epitope
LKAWSGK

SEQ ID NO: 2471 - protein, 7 aa, Artificial Sequence
  epitope
  misc_feature (3)..(3): Xaa can be any naturally occurring amino acid
LKXWSGK

SEQ ID NO: 2472 - protein, 8 aa, Artificial Sequence
  epitope
SGKTENEE

SEQ ID NO: 2473 - protein, 8 aa, Artificial Sequence
  epitope
  misc_feature (6)..(6): Xaa can be any naturally occurring amino acid
SGKTEXEE

SEQ ID NO: 2474 - protein, 8 aa, Artificial Sequence
  epitope
  misc_feature (1)..(2): Xaa can be any naturally occurring amino acid
  misc_feature (6)..(6): Xaa can be any naturally occurring amino acid
  misc_feature (8)..(8): Xaa can be any naturally occurring amino acid
XXKTEXEX

SEQ ID NO: 2475 - protein, 15 aa, Artificial Sequence
  epitope
  misc_feature (1)..(1): Xaa can be any naturally occurring amino acid
  misc_feature (12)..(15): Xaa can be any naturally occurring amino acid
XSTLKAWSGKTXXXX

SEQ ID NO: 2476 - protein, 15 aa, Artificial Sequence
  epitope
  misc_feature (1)..(4): Xaa can be any naturally occurring amino acid
  misc_feature (8)..(9): Xaa can be any naturally occurring amino acid
  misc_feature (12)..(15): Xaa can be any naturally occurring amino acid
XXXXKAWXXKTXXXX

SEQ ID NO: 2477 - protein, 15 aa, Artificial Sequence
  epitope
  misc_feature (1)..(1): Xaa can be any naturally occurring amino acid
  misc_feature (4)..(5): Xaa can be any naturally occurring amino acid
  misc_feature (9)..(9): Xaa can be any naturally occurring amino acid
  misc_feature (15)..(15): Xaa can be any naturally occurring amino acid
XSTXXAWSXKTENEX

SEQ ID NO: 2478 - protein, 15 aa, Artificial Sequence
  epitope
  misc_feature (1)..(1): Xaa can be any naturally occurring amino acid
  misc_feature (3)..(5): Xaa can be any naturally occurring amino acid
  misc_feature (9)..(9): Xaa can be any naturally occurring amino acid
  misc_feature (15)..(15): Xaa can be any naturally occurring amino acid
XSXXXAWSXKTENEX

SEQ ID NO: 2479 - protein, 15 aa, Artificial Sequence
  epitope
  misc_feature (1)..(5): Xaa can be any naturally occurring amino acid
  misc_feature (9)..(9): Xaa can be any naturally occurring amino acid
  misc_feature (12)..(12): Xaa can be any naturally occurring amino acid
  misc_feature (14)..(15): Xaa can be any naturally occurring amino acid
XXXXXAWSXKTXNXX

SEQ ID NO: 2480 - protein, 5 aa, Artificial Sequence
  epitope
KAWSG

SEQ ID NO: 2481 - protein, 15 aa, Artificial Sequence
  epitope
  misc_feature (12)..(15): Xaa can be any naturally occurring amino acid
QSTLKAWSGKTXXXX

SEQ ID NO: 2482 - protein, 15 aa, Artificial Sequence
  epitope
  misc_feature (1)..(3): Xaa can be any naturally occurring amino acid
  misc_feature (12)..(15): Xaa can be any naturally occurring amino acid
XXXLKAWSGKTXXXX

SEQ ID NO: 2483 - protein, 15 aa, Artificial Sequence
  epitope
  misc_feature (1)..(4): Xaa can be any naturally occurring amino acid
  misc_feature (12)..(15): Xaa can be any naturally occurring amino acid
XXXXKAWSGKTXXXX

SEQ ID NO: 2484 - protein, 15 aa, Artificial Sequence
  epitope
  misc_feature (2)..(3): Xaa can be any naturally occurring amino acid
  misc_feature (5)..(7): Xaa can be any naturally occurring amino acid
  misc_feature (12)..(15): Xaa can be any naturally occurring amino acid
QXXLXXXSGKTXXXX

SEQ ID NO: 2485 - protein, 15 aa, Artificial Sequence
  epitope
  misc_feature (4)..(4): Xaa can be any naturally occurring amino acid
  misc_feature (6)..(6): Xaa can be any naturally occurring amino acid
  misc_feature (15)..(15): Xaa can be any naturally occurring amino acid
QSTXKXWSGKTENEX

SEQ ID NO: 2486 - protein, 15 aa, Artificial Sequence
  epitope
  misc_feature (1)..(1): Xaa can be any naturally occurring amino acid
  misc_feature (3)..(4): Xaa can be any naturally occurring amino acid
  misc_feature (6)..(6): Xaa can be any naturally occurring amino acid
  misc_feature (9)..(9): Xaa can be any naturally occurring amino acid
  misc_feature (14)..(15): Xaa can be any naturally occurring amino acid
XSXXKXWSXKTENXX

SEQ ID NO: 2487 - protein, 6 aa, Artificial Sequence
  epitope
KAWSGK

SEQ ID NO: 2488 - protein, 6 aa, Artificial Sequence
  epitope
  misc_feature (2)..(2): Xaa can be any naturally occurring amino acid
KXWSGK

SEQ ID NO: 2489 - protein, 6 aa, Artificial Sequence
  epitope
  misc_feature (2)..(2): Xaa can be any naturally occurring amino acid
  misc_feature (5)..(5): Xaa can be any naturally occurring amino acid
KXWSXK

SEQ ID NO: 2490 - protein, 15 aa, Artificial Sequence
  epitope
  misc_feature (1)..(3): Xaa can be any naturally occurring amino acid
  misc_feature (6)..(6): Xaa can be any naturally occurring amino acid
  misc_feature (8)..(9): Xaa can be any naturally occurring amino acid
  misc_feature (12)..(15): Xaa can be any naturally occurring amino acid
XXXLKXWXXKTXXXX

SEQ ID NO: 2491 - protein, 15 aa, Artificial Sequence
  epitope
SSQVSFQPSQLNPQA

SEQ ID NO: 2492 - protein, 10 aa, Artificial Sequence
  epitope
SSQVSFQPSQ

SEQ ID NO: 2493 - protein, 6 aa, Artificial Sequence
  epitope
SSQVSF

SEQ ID NO: 2494 - protein, 4 aa, Artificial Sequence
  epitope
QVSF

SEQ ID NO: 2495 - protein, 9 aa, Artificial Sequence
  epitope
FQPSQLNPQ

SEQ ID NO: 2496 - protein, 15 aa, Artificial Sequence
  epitope
  misc_feature (1)..(1): Xaa can be any naturally occurring amino acid
  misc_feature (4)..(5): Xaa can be any naturally occurring amino acid
  misc_feature (7)..(9): Xaa can be any naturally occurring amino acid
  misc_feature (11)..(15): Xaa can be any naturally occurring amino acid
XSQXXFXXXQXXXXX

SEQ ID NO: 2497 - protein, 4 aa, Artificial Sequence
  epitope
QVSF

SEQ ID NO: 2498 - protein, 15 aa, Artificial Sequence
  epitope
  misc_feature (7)..(15): Xaa can be any naturally occurring amino acid
SSQVSFXXXXXXXXX

SEQ ID NO: 2499 - protein, 5 aa, Artificial Sequence
  epitope
SQVSF

SEQ ID NO: 2500 - protein, 4 aa, Artificial Sequence
  epitope
QVSF

SEQ ID NO: 2501 - protein, 10 aa, Artificial Sequence
  epitope
SFQPSQLNPQ

SEQ ID NO: 2502 - protein, 10 aa, Artificial Sequence
  epitope
SSQVSFQPSQ

SEQ ID NO: 2503 - protein, 6 aa, Artificial Sequence
  epitope
SSQVSF

SEQ ID NO: 2504 - protein, 6 aa, Artificial Sequence
  epitope
SSQVSF

SEQ ID NO: 2505 - protein, 5 aa, Artificial Sequence
  epitope
SQVSF

SEQ ID NO: 2506 - protein, 10 aa, Artificial Sequence
  epitope
SSQVSFQPSQ

SEQ ID NO: 2507 - protein, 5 aa, Artificial Sequence
  epitope
SQVSF

SEQ ID NO: 2508 - protein, 5 aa, Artificial Sequence
  epitope
SQVSF

SEQ ID NO: 2509 - protein, 4 aa, Artificial Sequence
  epitope
QVSF

SEQ ID NO: 2510 - protein, 7 aa, Artificial Sequence
  epitope
PSQLNPQ

SEQ ID NO: 2511 - protein, 15 aa, Artificial Sequence
  epitope
  misc_feature (3)..(3): Xaa can be any naturally occurring amino acid
  misc_feature (6)..(15): Xaa can be any naturally occurring amino acid
SSXVSXXXXXXXXXX

SEQ ID NO: 2512 - protein, 5 aa, Artificial Sequence
  epitope
SQVSF

SEQ ID NO: 2513 - protein, 15 aa, Artificial Sequence
  epitope
  misc_feature (2)..(5): Xaa can be any naturally occurring amino acid
  misc_feature (7)..(8): Xaa can be any naturally occurring amino acid
  misc_feature (10)..(10): Xaa can be any naturally occurring amino acid
  misc_feature (13)..(14): Xaa can be any naturally occurring amino acid
SXXXXFXXSXLNXXA

SEQ ID NO: 2514 - protein, 10 aa, Artificial Sequence
  epitope
SFQPSQLNPQ

SEQ ID NO: 2515 - protein, 6 aa, Artificial Sequence
  epitope
SFQPSQ

SEQ ID NO: 2516 - protein, 6 aa, Artificial Sequence
  epitope
SSQVSF

SEQ ID NO: 2517 - protein, 10 aa, Artificial Sequence
  epitope
QVSFQPSQLN

SEQ ID NO: 2518 - protein, 7 aa, Artificial Sequence
  epitope
PSQLNPQ

SEQ ID NO: 2519 - protein, 5 aa, Artificial Sequence
  epitope
PSQLN

SEQ ID NO: 2520 - protein, 15 aa, Artificial Sequence
  epitope
  misc_feature (1)..(5): Xaa can be any naturally occurring amino acid
  misc_feature (8)..(8): Xaa can be any naturally occurring amino acid
XXXXXFQXSQLNPQA

SEQ ID NO: 2521 - protein, 15 aa, Artificial Sequence
  epitope
  misc_feature (1)..(5): Xaa can be any naturally occurring amino acid
  misc_feature (7)..(8): Xaa can be any naturally occurring amino acid
  misc_feature (10)..(11): Xaa can be any naturally occurring amino acid
XXXXXFXXSXXNPQA

SEQ ID NO: 2522 - protein, 15 aa, Artificial Sequence
  epitope
  misc_feature (1)..(8): Xaa can be any naturally occurring amino acid
  misc_feature (10)..(11): Xaa can be any naturally occurring amino acid
  misc_feature (13)..(13): Xaa can be any naturally occurring amino acid
XXXXXXXXSXXNXQA

SEQ ID NO: 2523 - protein, 8 aa, Artificial Sequence
  epitope
PSQLNPQA

SEQ ID NO: 2524 - protein, 7 aa, Artificial Sequence
  epitope
PSQLNPQ

SEQ ID NO: 2525 - protein, 7 aa, Artificial Sequence
  epitope
  misc_feature (1)..(1): Xaa can be any naturally occurring amino acid
XSQLNPQ

SEQ ID NO: 2526 - protein, 7 aa, Artificial Sequence
  epitope
  misc_feature (1)..(1): Xaa can be any naturally occurring amino acid
  misc_feature (3)..(4): Xaa can be any naturally occurring amino acid
XSXXNPQ

SEQ ID NO: 2527 - protein, 15 aa, Artificial Sequence
  epitope
  misc_feature (3)..(5): Xaa can be any naturally occurring amino acid
  misc_feature (8)..(11): Xaa can be any naturally occurring amino acid
  misc_feature (13)..(15): Xaa can be any naturally occurring amino acid
SSXXXFQXXXXNXXX

SEQ ID NO: 2528 - protein, 6 aa, Artificial Sequence
  epitope
SSQVSF

SEQ ID NO: 2529 - protein, 9 aa, Artificial Sequence
  epitope
FQPSQLNPQ

SEQ ID NO: 2530 - protein, 8 aa, Artificial Sequence
  epitope
FQPSQLNP

SEQ ID NO: 2531 - protein, 7 aa, Artificial Sequence
  epitope
FQPSQLN

SEQ ID NO: 2532 - protein, 15 aa, Artificial Sequence
  epitope
  misc_feature (10)..(10): Xaa can be any naturally occurring amino acid
  misc_feature (12)..(13): Xaa can be any naturally occurring amino acid
  misc_feature (15)..(15): Xaa can be any naturally occurring amino acid
SSQVSFQPSXLXXQX

SEQ ID NO: 2533 - protein, 15 aa, Artificial Sequence
  epitope
  misc_feature (1)..(1): Xaa can be any naturally occurring amino acid
  misc_feature (4)..(7): Xaa can be any naturally occurring amino acid
  misc_feature (10)..(10): Xaa can be any naturally occurring amino acid
  misc_feature (12)..(15): Xaa can be any naturally occurring amino acid
XSQXXXXPSXLXXXX

SEQ ID NO: 2534 - protein, 10 aa, Artificial Sequence
  epitope
SSQVSFQPSQ

SEQ ID NO: 2535 - protein, 10 aa, Artificial Sequence
  epitope
  misc_feature (10)..(10): Xaa can be any naturally occurring amino acid
SSQVSFQPSX

SEQ ID NO: 2536 - protein, 10 aa, Artificial Sequence
  epitope
  misc_feature (1)..(1): Xaa can be any naturally occurring amino acid
  misc_feature (4)..(7): Xaa can be any naturally occurring amino acid
  misc_feature (10)..(10): Xaa can be any naturally occurring amino acid
XSQXXXXPSX

SEQ ID NO: 2537 - protein, 10 aa, Artificial Sequence
  epitope
SFQPSQLNPQ

SEQ ID NO: 2538 - protein, 10 aa, Artificial Sequence
  epitope
  misc_feature (6)..(6): Xaa can be any naturally occurring amino acid
  misc_feature (8)..(9): Xaa can be any naturally occurring amino acid
SFQPSXLXXQ

SEQ ID NO: 2539 - protein, 10 aa, Artificial Sequence
  epitope
  misc_feature (1)..(3): Xaa can be any naturally occurring amino acid
  misc_feature (6)..(6): Xaa can be any naturally occurring amino acid
  misc_feature (8)..(10): Xaa can be any naturally occurring amino acid
XXXPSXLXXX

SEQ ID NO: 2540 - protein, 15 aa, Artificial Sequence
  epitope
  misc_feature (1)..(3): Xaa can be any naturally occurring amino acid
  misc_feature (7)..(8): Xaa can be any naturally occurring amino acid
  misc_feature (10)..(10): Xaa can be any naturally occurring amino acid
  misc_feature (14)..(15): Xaa can be any naturally occurring amino acid
XXXVSFXXSXLNPXX

SEQ ID NO: 2541 - protein, 10 aa, Artificial Sequence
  epitope
SSQVSFQPSQ

SEQ ID NO: 2542 - protein, 6 aa, Artificial Sequence
  epitope
SSQVSF

SEQ ID NO: 2543 - protein, 9 aa, Artificial Sequence
  epitope
VSFQPSQLN

SEQ ID NO: 2544 - protein, 9 aa, Artificial Sequence
  epitope
  misc_feature (4)..(5): Xaa can be any naturally occurring amino acid
  misc_feature (7)..(7): Xaa can be any naturally occurring amino acid
VSFXXSXLN

SEQ ID NO: 2545 - protein, 15 aa, Artificial Sequence
  epitope
LQQSTYQLVQQLCCQ

SEQ ID NO: 2546 - protein, 10 aa, Artificial Sequence
  epitope
LQQSTYQLVQ

SEQ ID NO: 2547 - protein, 10 aa, Artificial Sequence
  epitope
QSTYQLVQQL

SEQ ID NO: 2548 - protein, 4 aa, Artificial Sequence
  epitope
QSTY

SEQ ID NO: 2549 - protein, 8 aa, Artificial Sequence
  epitope
QLVQQLCC

SEQ ID NO: 2550 - protein, 15 aa, Artificial Sequence
  epitope
  misc_feature (2)..(2): Xaa can be any naturally occurring amino acid
  misc_feature (7)..(7): Xaa can be any naturally occurring amino acid
  misc_feature (10)..(15): Xaa can be any naturally occurring amino acid
LXQSTYXLVXXXXXX

SEQ ID NO: 2551 - protein, 9 aa, Artificial Sequence
  epitope
YQLVQQLCC

SEQ ID NO: 2552 - protein, 8 aa, Artificial Sequence
  epitope
QLVQQLCC

SEQ ID NO: 2553 - protein, 4 aa, Artificial Sequence
  epitope
QLVQ

SEQ ID NO: 2554 - protein, 10 aa, Artificial Sequence
  epitope
LQQSTYQLVQ

SEQ ID NO: 2555 - protein, 10 aa, Artificial Sequence
  epitope
QSTYQLVQQL

SEQ ID NO: 2556 - protein, 8 aa, Artificial Sequence
  epitope
QLVQQLCC

SEQ ID NO: 2557 - protein, 15 aa, Artificial Sequence
  epitope
  misc_feature (1)..(4): Xaa can be any naturally occurring amino acid
  misc_feature (7)..(7): Xaa can be any naturally occurring amino acid
  misc_feature (9)..(11): Xaa can be any naturally occurring amino acid
  misc_feature (13)..(15): Xaa can be any naturally occurring amino acid
XXXXTYXLXXXLXXX

SEQ ID NO: 2558 - protein, 10 aa, Artificial Sequence
  epitope
QSTYQLVQQL

SEQ ID NO: 2559 - protein, 7 aa, Artificial Sequence
  epitope
LVQQLCC

SEQ ID NO: 2560 - protein, 10 aa, Artificial Sequence
  epitope
LQQSTYQLVQ

SEQ ID NO: 2561 - protein, 5 aa, Artificial Sequence
  epitope
LVQQL

SEQ ID NO: 2562 - protein, 10 aa, Artificial Sequence
  epitope
QSTYQLVQQL

SEQ ID NO: 2563 - protein, 8 aa, Artificial Sequence
  epitope
QLVQQLCC

SEQ ID NO: 2564 - protein, 5 aa, Artificial Sequence
  epitope
QLVQQ

SEQ ID NO: 2565 - protein, 8 aa, Artificial Sequence
  epitope
QSTYQLVQ

SEQ ID NO: 2566 - protein, 9 aa, Artificial Sequence
  epitope
YQLVQQLCC

SEQ ID NO: 2567 - protein, 5 aa, Artificial Sequence
  epitope
QLVQQ

SEQ ID NO: 2568 - protein, 15 aa, Artificial Sequence
  epitope
  misc_feature (1)..(3): Xaa can be any naturally occurring amino acid
  misc_feature (10)..(11): Xaa can be any naturally occurring amino acid
  misc_feature (13)..(13): Xaa can be any naturally occurring amino acid
  misc_feature (15)..(15): Xaa can be any naturally occurring amino acid
XXXSTYQLVXXLXCX

SEQ ID NO: 2569 - protein, 6 aa, Artificial Sequence
  epitope
QLVQQL

SEQ ID NO: 2570 - protein, 5 aa, Artificial Sequence
  epitope
QLVQQ

SEQ ID NO: 2571 - protein, 15 aa, Artificial Sequence
  epitope
  misc_feature (1)..(1): Xaa can be any naturally occurring amino acid
  misc_feature (10)..(11): Xaa can be any naturally occurring amino acid
  misc_feature (13)..(13): Xaa can be any naturally occurring amino acid
  misc_feature (15)..(15): Xaa can be any naturally occurring amino acid
XQQSTYQLVXXLXCX

SEQ ID NO: 2572 - protein, 15 aa, Artificial Sequence
  epitope
  misc_feature (1)..(3): Xaa can be any naturally occurring amino acid
  misc_feature (5)..(5): Xaa can be any naturally occurring amino acid
  misc_feature (10)..(15): Xaa can be any naturally occurring amino acid
XXXSXYQLVXXXXXX

SEQ ID NO: 2573 - protein, 7 aa, Artificial Sequence
  epitope
YQLVQQL

SEQ ID NO: 2574 - protein, 6 aa, Artificial Sequence
  epitope
QLVQQL

SEQ ID NO: 2575 - protein, 4 aa, Artificial Sequence
  epitope
QLVQ

SEQ ID NO: 2576 - protein, 15 aa, Artificial Sequence
  epitope
  misc_feature (1)..(3): Xaa can be any naturally occurring amino acid
  misc_feature (9)..(13): Xaa can be any naturally occurring amino acid
  misc_feature (15)..(15): Xaa can be any naturally occurring amino acid
XXXSTYQLXXXXXCX

SEQ ID NO: 2577 - protein, 15 aa, Artificial Sequence
  epitope
  misc_feature (1)..(3): Xaa can be any naturally occurring amino acid
  misc_feature (9)..(15): Xaa can be any naturally occurring amino acid
XXXSTYQLXXXXXXX

SEQ ID NO: 2578 - protein, 7 aa, Artificial Sequence
  epitope
YQLVQQL

SEQ ID NO: 2579 - protein, 6 aa, Artificial Sequence
  epitope
YQLVQQ

SEQ ID NO: 2580 - protein, 15 aa, Artificial Sequence
  epitope
  misc_feature (1)..(1): Xaa can be any naturally occurring amino acid
  misc_feature (3)..(3): Xaa can be any naturally occurring amino acid
  misc_feature (10)..(13): Xaa can be any naturally occurring amino acid
  misc_feature (15)..(15): Xaa can be any naturally occurring amino acid
XQXSTYQLVXXXXCX

SEQ ID NO: 2581 - protein, 15 aa, Artificial Sequence
  epitope
  misc_feature (1)..(4): Xaa can be any naturally occurring amino acid
  misc_feature (7)..(7): Xaa can be any naturally occurring amino acid
  misc_feature (10)..(15): Xaa can be any naturally occurring amino acid
XXXXTYXLVXXXXXX

SEQ ID NO: 2582 - protein, 7 aa, Artificial Sequence
  epitope
YQLVQQL

SEQ ID NO: 2583 - protein, 5 aa, Artificial Sequence
  epitope
QLVQQ

SEQ ID NO: 2584 - protein, 4 aa, Artificial Sequence
  epitope
QLVQ

SEQ ID NO: 2585 - protein, 10 aa, Artificial Sequence
  epitope
LQQSTYQLVQ

SEQ ID NO: 2586 - protein, 8 aa, Artificial Sequence
  epitope
LQQSTYQL

SEQ ID NO: 2587 - protein, 8 aa, Artificial Sequence
  epitope
QLVQQLCC

SEQ ID NO: 2588 - protein, 4 aa, Artificial Sequence
  epitope
QQLC

SEQ ID NO: 2589 - protein, 10 aa, Artificial Sequence
  epitope
QSTYQLVQQL

SEQ ID NO: 2590 - protein, 8 aa, Artificial Sequence
  epitope
QLVQQLCC

SEQ ID NO: 2591 - protein, 6 aa, Artificial Sequence
  epitope
QLVQQL

SEQ ID NO: 2592 - protein, 6 aa, Artificial Sequence
  epitope
YQLVQQ

SEQ ID NO: 2593 - protein, 4 aa, Artificial Sequence
  epitope
QLVQ

SEQ ID NO: 2594 - protein, 6 aa, Artificial Sequence
  epitope
QLVQQL

SEQ ID NO: 2595 - protein, 4 aa, Artificial Sequence
  epitope
VQQL

SEQ ID NO: 2596 - protein, 15 aa, Artificial Sequence
  epitope
  misc_feature (1)..(3): Xaa can be any naturally occurring amino acid
  misc_feature (5)..(5): Xaa can be any naturally occurring amino acid
  misc_feature (7)..(11): Xaa can be any naturally occurring amino acid
  misc_feature (13)..(13): Xaa can be any naturally occurring amino acid
  misc_feature (15)..(15): Xaa can be any naturally occurring amino acid
XXXSXYXXXXXLXCX

SEQ ID NO: 2597 - protein, 8 aa, Artificial Sequence
  epitope
QQSTYQLV

SEQ ID NO: 2598 - protein, 9 aa, Artificial Sequence
  epitope
YQLVQQLCC

SEQ ID NO: 2599 - protein, 8 aa, Artificial Sequence
  epitope
QLVQQLCC

SEQ ID NO: 2600 - protein, 4 aa, Artificial Sequence
  epitope
QQLC

SEQ ID NO: 2601 - protein, 9 aa, Artificial Sequence
  epitope
QQSTYQLVQ

SEQ ID NO: 2602 - protein, 8 aa, Artificial Sequence
  epitope
QQSTYQLV

SEQ ID NO: 2603 - protein, 7 aa, Artificial Sequence
  epitope
QLVQQLC

SEQ ID NO: 2604 - protein, 5 aa, Artificial Sequence
  epitope
YQLVQ

SEQ ID NO: 2605 - protein, 4 aa, Artificial Sequence
  epitope
QLVQ

SEQ ID NO: 2606 - protein, 6 aa, Artificial Sequence
  epitope
QLVQQL

SEQ ID NO: 2607 - protein, 10 aa, Artificial Sequence
  epitope
LQQSTYQLVQ

SEQ ID NO: 2608 - protein, 6 aa, Artificial Sequence
  epitope
QLVQQL

SEQ ID NO: 2609 - protein, 8 aa, Artificial Sequence
  epitope
QLVQQLCC

SEQ ID NO: 2610 - protein, 9 aa, Artificial Sequence
  epitope
LQQSTYQLV

SEQ ID NO: 2611 - protein, 10 aa, Artificial Sequence
  epitope
QSTYQLVQQL

SEQ ID NO: 2612 - protein, 8 aa, Artificial Sequence
  epitope
QLVQQLCC

SEQ ID NO: 2613 - protein, 15 aa, Artificial Sequence
  epitope
SAKPLLASLSKRVLT

SEQ ID NO: 2614 - protein, 5 aa, Artificial Sequence
  epitope
AKPLL

SEQ ID NO: 2615 - protein, 6 aa, Artificial Sequence
  epitope
SLSKRV

SEQ ID NO: 2616 - protein, 5 aa, Artificial Sequence
  epitope
AKPLL

SEQ ID NO: 2617 - protein, 4 aa, Artificial Sequence
  epitope
SKRV

SEQ ID NO: 2618 - protein, 15 aa, Artificial Sequence
  epitope
  misc_feature (1)..(5): Xaa can be any naturally occurring amino acid
  misc_feature (12)..(13): Xaa can be any naturally occurring amino acid
  misc_feature (15)..(15): Xaa can be any naturally occurring amino acid
XXXXXLASLSKXXLX

SEQ ID NO: 2619 - protein, 6 aa, Artificial Sequence
  epitope
LASLSK

SEQ ID NO: 2620 - protein, 15 aa, Artificial Sequence
  epitope
  misc_feature (1)..(8): Xaa can be any naturally occurring amino acid
  misc_feature (11)..(11): Xaa can be any naturally occurring amino acid
  misc_feature (13)..(13): Xaa can be any naturally occurring amino acid
  misc_feature (15)..(15): Xaa can be any naturally occurring amino acid
XXXXXXXXLSXRXLX

SEQ ID NO: 2621 - protein, 4 aa, Artificial Sequence
  epitope
LLAS

SEQ ID NO: 2622 - protein, 15 aa, Artificial Sequence
  epitope
  misc_feature (2)..(5): Xaa can be any naturally occurring amino acid
  misc_feature (8)..(12): Xaa can be any naturally occurring amino acid
  misc_feature (15)..(15): Xaa can be any naturally occurring amino acid
SXXXXLAXXXXXVLX

SEQ ID NO: 2623 - protein, 6 aa, Artificial Sequence
  epitope
SAKPLL

SEQ ID NO: 2624 - protein, 5 aa, Artificial Sequence
  epitope
AKPLL

SEQ ID NO: 2625 - protein, 7 aa, Artificial Sequence
  epitope
ASLSKRV

SEQ ID NO: 2626 - protein, 5 aa, Artificial Sequence
  epitope
LSKRV

SEQ ID NO: 2627 - protein, 9 aa, Artificial Sequence
  epitope
LLASLSKRV

SEQ ID NO: 2628 - protein, 15 aa, Artificial Sequence
  epitope
  misc_feature (1)..(4): Xaa can be any naturally occurring amino acid
  misc_feature (12)..(15): Xaa can be any naturally occurring amino acid
XXXXLLASLSKXXXX

SEQ ID NO: 2629 - protein, 15 aa, Artificial Sequence
  epitope
  misc_feature (1)..(4): Xaa can be any naturally occurring amino acid
  misc_feature (8)..(8): Xaa can be any naturally occurring amino acid
  misc_feature (12)..(15): Xaa can be any naturally occurring amino acid
XXXXLLAXLSKXXXX

SEQ ID NO: 2630 - protein, 6 aa, Artificial Sequence
  epitope
LASLSK

SEQ ID NO: 2631 - protein, 15 aa, Artificial Sequence
  epitope
RFEKEAAEMNKRSFK

SEQ ID NO: 2632 - protein, 15 aa, Artificial Sequence
  epitope
  misc_feature (1)..(3): Xaa can be any naturally occurring amino acid
  misc_feature (5)..(6): Xaa can be any naturally occurring amino acid
  misc_feature (10)..(15): Xaa can be any naturally occurring amino acid
XXXKXXAEMXXXXXX

SEQ ID NO: 2633 - protein, 6 aa, Artificial Sequence
  epitope
KEAAEM

SEQ ID NO: 2634 - protein, 4 aa, Artificial Sequence
  epitope
EAAE

SEQ ID NO: 2635 - protein, 15 aa, Artificial Sequence
  epitope
  misc_feature (1)..(3): Xaa can be any naturally occurring amino acid
  misc_feature (6)..(6): Xaa can be any naturally occurring amino acid
  misc_feature (11)..(15): Xaa can be any naturally occurring amino acid
XXXKEXAEMNXXXXX

SEQ ID NO: 2636 - protein, 15 aa, Artificial Sequence
  epitope
  misc_feature (1)..(3): Xaa can be any naturally occurring amino acid
  misc_feature (6)..(6): Xaa can be any naturally occurring amino acid
  misc_feature (10)..(15): Xaa can be any naturally occurring amino acid
XXXKEXAEMXXXXXX

SEQ ID NO: 2637 - protein, 6 aa, Artificial Sequence
  epitope
KEAAEM

SEQ ID NO: 2638 - protein, 4 aa, Artificial Sequence
  epitope
EAAE

SEQ ID NO: 2639 - protein, 15 aa, Artificial Sequence
  epitope
  misc_feature (1)..(3): Xaa can be any naturally occurring amino acid
  misc_feature (5)..(9): Xaa can be any naturally occurring amino acid
  misc_feature (13)..(15): Xaa can be any naturally occurring amino acid
XXXKXXXXXNKRXXX

SEQ ID NO: 2640 - protein, 10 aa, Artificial Sequence
  epitope
RFEKEAAEMN

SEQ ID NO: 2641 - protein, 6 aa, Artificial Sequence
  epitope
KEAAEM

SEQ ID NO: 2642 - protein, 6 aa, Artificial Sequence
  epitope
KEAAEM

SEQ ID NO: 2643 - protein, 7 aa, Artificial Sequence
  epitope
KEAAEMN

SEQ ID NO: 2644 - protein, 7 aa, Artificial Sequence
  epitope
  misc_feature (3)..(3): Xaa can be any naturally occurring amino acid
  misc_feature (6)..(6): Xaa can be any naturally occurring amino acid
KEXAEXN

SEQ ID NO: 2645 - protein, 15 aa, Artificial Sequence
  epitope
  misc_feature (1)..(3): Xaa can be any naturally occurring amino acid
  misc_feature (6)..(6): Xaa can be any naturally occurring amino acid
  misc_feature (9)..(9): Xaa can be any naturally occurring amino acid
  misc_feature (13)..(15): Xaa can be any naturally occurring amino acid
XXXKEXAEXNKRXXX

SEQ ID NO: 2646 - protein, 7 aa, Artificial Sequence
  epitope
KEAAEMN

SEQ ID NO: 2647 - protein, 6 aa, Artificial Sequence
  epitope
KEAAEM

SEQ ID NO: 2648 - protein, 6 aa, Artificial Sequence
  epitope
NKRSFK

SEQ ID NO: 2649 - protein, 5 aa, Artificial Sequence
  epitope
KEAAE

SEQ ID NO: 2650 - protein, 5 aa, Artificial Sequence
  epitope
  misc_feature (3)..(3): Xaa can be any naturally occurring amino acid
KEXAE

SEQ ID NO: 2651 - protein, 15 aa, Artificial Sequence
  epitope
  misc_feature (2)..(2): Xaa can be any naturally occurring amino acid
  misc_feature (6)..(6): Xaa can be any naturally occurring amino acid
  misc_feature (10)..(15): Xaa can be any naturally occurring amino acid
RXEKEXAEMXXXXXX

SEQ ID NO: 2652 - protein, 6 aa, Artificial Sequence
  epitope
KEAAEM

SEQ ID NO: 2653 - protein, 4 aa, Artificial Sequence
  epitope
EAAE

SEQ ID NO: 2654 - protein, 15 aa, Artificial Sequence
  epitope
  misc_feature (1)..(3): Xaa can be any naturally occurring amino acid
  misc_feature (11)..(15): Xaa can be any naturally occurring amino acid
XXXKEAAEMNXXXXX

SEQ ID NO: 2655 - protein, 7 aa, Artificial Sequence
  epitope
EAAEMNK

SEQ ID NO: 2656 - protein, 7 aa, Artificial Sequence
  epitope
  misc_feature (5)..(5): Xaa can be any naturally occurring amino acid
  misc_feature (7)..(7): Xaa can be any naturally occurring amino acid
EAAEXNX

SEQ ID NO: 2657 - protein, 15 aa, Artificial Sequence
  epitope
  misc_feature (1)..(2): Xaa can be any naturally occurring amino acid
  misc_feature (4)..(9): Xaa can be any naturally occurring amino acid
  misc_feature (13)..(15): Xaa can be any naturally occurring amino acid
XXEXXXXXXNKRXXX

SEQ ID NO: 2658 - protein, 7 aa, Artificial Sequence
  epitope
FEKEAAE

SEQ ID NO: 2659 - protein, 10 aa, Artificial Sequence
  epitope
EAAEMNKRSF

SEQ ID NO: 2660 - protein, 7 aa, Artificial Sequence
  epitope
EMNKRSF

SEQ ID NO: 2661 - protein, 15 aa, Artificial Sequence
  epitope
  misc_feature (8)..(9): Xaa can be any naturally occurring amino acid
  misc_feature (11)..(11): Xaa can be any naturally occurring amino acid
  misc_feature (13)..(14): Xaa can be any naturally occurring amino acid
RFEKEAAXXNXRXXK

SEQ ID NO: 2662 - protein, 15 aa, Artificial Sequence
  epitope
  misc_feature (1)..(1): Xaa can be any naturally occurring amino acid
  misc_feature (5)..(6): Xaa can be any naturally occurring amino acid
  misc_feature (8)..(9): Xaa can be any naturally occurring amino acid
  misc_feature (11)..(11): Xaa can be any naturally occurring amino acid
  misc_feature (13)..(15): Xaa can be any naturally occurring amino acid
XFEKXXAXXNXRXXX

SEQ ID NO: 2663 - protein, 6 aa, Artificial Sequence
  epitope
FEKEAA

SEQ ID NO: 2664 - protein, 5 aa, Artificial Sequence
  epitope
FEKEA

SEQ ID NO: 2665 - protein, 15 aa, Artificial Sequence
  epitope
  misc_feature (6)..(6): Xaa can be any naturally occurring amino acid
  misc_feature (11)..(11): Xaa can be any naturally occurring amino acid
  misc_feature (13)..(13): Xaa can be any naturally occurring amino acid
RFEKEXAEMNXRXFK

SEQ ID NO: 2666 - protein, 15 aa, Artificial Sequence
  epitope
  misc_feature (1)..(2): Xaa can be any naturally occurring amino acid
  misc_feature (6)..(6): Xaa can be any naturally occurring amino acid
  misc_feature (8)..(8): Xaa can be any naturally occurring amino acid
  misc_feature (10)..(13): Xaa can be any naturally occurring amino acid
  misc_feature (15)..(15): Xaa can be any naturally occurring amino acid
XXEKEXAXMXXXXFX

SEQ ID NO: 2667 - protein, 10 aa, Artificial Sequence
  epitope
RFEKEAAEMN

SEQ ID NO: 2668 - protein, 5 aa, Artificial Sequence
  epitope
KEAAE

SEQ ID NO: 2669 - protein, 5 aa, Artificial Sequence
  epitope
  misc_feature (3)..(3): Xaa can be any naturally occurring amino acid
KEXAE

SEQ ID NO: 2670 - protein, 15 aa, Artificial Sequence
  epitope
  misc_feature (6)..(15): Xaa can be any naturally occurring amino acid
RFEKEXXXXXXXXXX

SEQ ID NO: 2671 - protein, 9 aa, Artificial Sequence
  epitope
AEMNKRSFK

SEQ ID NO: 2672 - protein, 10 aa, Artificial Sequence
  epitope
RFEKEAAEMN

SEQ ID NO: 2673 - protein, 8 aa, Artificial Sequence
  epitope
EAAEMNKR

SEQ ID NO: 2674 - protein, 15 aa, Artificial Sequence
  epitope
YKGPTLLEALDQINE

SEQ ID NO: 2675 - protein, 15 aa, Artificial Sequence
  epitope
  misc_feature (2)..(5): Xaa can be any naturally occurring amino acid
  misc_feature (7)..(11): Xaa can be any naturally occurring amino acid
  misc_feature (15)..(15): Xaa can be any naturally occurring amino acid
YXXXXLXXXXXQINX

SEQ ID NO: 2676 - protein, 6 aa, Artificial Sequence
  epitope
YKGPTL

SEQ ID NO: 2677 - protein, 6 aa, Artificial Sequence
  epitope
YKGPTL

SEQ ID NO: 2678 - protein, 15 aa, Artificial Sequence
  epitope
  misc_feature (2)..(3): Xaa can be any naturally occurring amino acid
  misc_feature (5)..(5): Xaa can be any naturally occurring amino acid
  misc_feature (7)..(11): Xaa can be any naturally occurring amino acid
  misc_feature (13)..(15): Xaa can be any naturally occurring amino acid
YXXPXLXXXXXQXXX

SEQ ID NO: 2679 - protein, 6 aa, Artificial Sequence
  epitope
YKGPTL

SEQ ID NO: 2680 - protein, 6 aa, Artificial Sequence
  epitope
YKGPTL

SEQ ID NO: 2681 - protein, 15 aa, Artificial Sequence
  epitope
  misc_feature (7)..(15): Xaa can be any naturally occurring amino acid
YKGPTLXXXXXXXXX

SEQ ID NO: 2682 - protein, 6 aa, Artificial Sequence
  epitope
YKGPTL

SEQ ID NO: 2683 - protein, 5 aa, Artificial Sequence
  epitope
KGPTL

SEQ ID NO: 2684 - protein, 6 aa, Artificial Sequence
  epitope
YKGPTL

SEQ ID NO: 2685 - protein, 6 aa, Artificial Sequence
  epitope
YKGPTL

SEQ ID NO: 2686 - protein, 6 aa, Artificial Sequence
  epitope
  misc_feature (3)..(3): Xaa can be any naturally occurring amino acid
  misc_feature (5)..(5): Xaa can be any naturally occurring amino acid
YKXPXL

SEQ ID NO: 2687 - protein, 15 aa, Artificial Sequence
  epitope
  misc_feature (3)..(3): Xaa can be any naturally occurring amino acid
  misc_feature (5)..(11): Xaa can be any naturally occurring amino acid
  misc_feature (13)..(13): Xaa can be any naturally occurring amino acid
  misc_feature (15)..(15): Xaa can be any naturally occurring amino acid
YKXPXXXXXXXQXNX

SEQ ID NO: 2688 - protein, 6 aa, Artificial Sequence
  epitope
YKGPTL

SEQ ID NO: 2689 - protein, 6 aa, Artificial Sequence
  epitope
YKGPTL

SEQ ID NO: 2690 - protein, 15 aa, Artificial Sequence
  epitope
  misc_feature (5)..(8): Xaa can be any naturally occurring amino acid
  misc_feature (13)..(15): Xaa can be any naturally occurring amino acid
YKGPXXXXALDQXXX

SEQ ID NO: 2691 - protein, 15 aa, Artificial Sequence
  epitope
  misc_feature (3)..(8): Xaa can be any naturally occurring amino acid
  misc_feature (11)..(11): Xaa can be any naturally occurring amino acid
  misc_feature (13)..(15): Xaa can be any naturally occurring amino acid
YKXXXXXXALXQXXX

SEQ ID NO: 2692 - protein, 6 aa, Artificial Sequence
  epitope
YKGPTL

SEQ ID NO: 2693 - protein, 6 aa, Artificial Sequence
  epitope
YKGPTL

SEQ ID NO: 2694 - protein, 6 aa, Artificial Sequence
  epitope
YKGPTL

SEQ ID NO: 2695 - protein, 6 aa, Artificial Sequence
  epitope
YKGPTL

SEQ ID NO: 2696 - protein, 6 aa, Artificial Sequence
  epitope
YKGPTL

SEQ ID NO: 2697 - protein, 6 aa, Artificial Sequence
  epitope
YKGPTL

SEQ ID NO: 2698 - protein, 5 aa, Artificial Sequence
  epitope
KGPTL

SEQ ID NO: 2699 - protein, 6 aa, Artificial Sequence
  epitope
YKGPTL

SEQ ID NO: 2700 - protein, 6 aa, Artificial Sequence
  epitope
YKGPTL

SEQ ID NO: 2701 - protein, 15 aa, Artificial Sequence
  epitope
VYKIGGIGTVPVGRV

SEQ ID NO: 2702 - protein, 10 aa, Artificial Sequence
  epitope
YKIGGIGTVP

SEQ ID NO: 2703 - protein, 9 aa, Artificial Sequence
  epitope
YKIGGIGTV

SEQ ID NO: 2704 - protein, 6 aa, Artificial Sequence
  epitope
YKIGGI

SEQ ID NO: 2705 - protein, 10 aa, Artificial Sequence
  epitope
YKIGGIGTVP

SEQ ID NO: 2706 - protein, 9 aa, Artificial Sequence
  epitope
YKIGGIGTV

SEQ ID NO: 2707 - protein, 8 aa, Artificial Sequence
  epitope
YKIGGIGT

SEQ ID NO: 2708 - protein, 9 aa, Artificial Sequence
  epitope
YKIGGIGTV

SEQ ID NO: 2709 - protein, 8 aa, Artificial Sequence
  epitope
YKIGGIGT

SEQ ID NO: 2710 - protein, 5 aa, Artificial Sequence
  epitope
YKIGG

SEQ ID NO: 2711 - protein, 8 aa, Artificial Sequence
  epitope
YKIGGIGT

SEQ ID NO: 2712 - protein, 5 aa, Artificial Sequence
  epitope
YKIGG

SEQ ID NO: 2713 - protein, 4 aa, Artificial Sequence
  epitope
KIGG

SEQ ID NO: 2714 - protein, 10 aa, Artificial Sequence
  epitope
GIGTVPVGRV

SEQ ID NO: 2715 - protein, 9 aa, Artificial Sequence
  epitope
YKIGGIGTV

SEQ ID NO: 2716 - protein, 6 aa, Artificial Sequence
  epitope
YKIGGI

SEQ ID NO: 2717 - protein, 5 aa, Artificial Sequence
  epitope
YKIGG

SEQ ID NO: 2718 - protein, 10 aa, Artificial Sequence
  epitope
GIGTVPVGRV

SEQ ID NO: 2719 - protein, 5 aa, Artificial Sequence
  epitope
YKIGG

SEQ ID NO: 2720 - protein, 10 aa, Artificial Sequence
  epitope
IGGIGTVPVG

SEQ ID NO: 2721 - protein, 8 aa, Artificial Sequence
  epitope
GIGTVPVG

SEQ ID NO: 2722 - protein, 5 aa, Artificial Sequence
  epitope
YKIGG

SEQ ID NO: 2723 - protein, 4 aa, Artificial Sequence
  epitope
KIGG

SEQ ID NO: 2724 - protein, 10 aa, Artificial Sequence
  epitope
GIGTVPVGRV

SEQ ID NO: 2725 - protein, 5 aa, Artificial Sequence
  epitope
YKIGG

SEQ ID NO: 2726 - protein, 4 aa, Artificial Sequence
  epitope
KIGG

SEQ ID NO: 2727 - protein, 9 aa, Artificial Sequence
  epitope
GIGTVPVGR

SEQ ID NO: 2728 - protein, 15 aa, Artificial Sequence
  epitope
  misc_feature (1)..(1): Xaa can be any naturally occurring amino acid
  misc_feature (3)..(11): Xaa can be any naturally occurring amino acid
  misc_feature (15)..(15): Xaa can be any naturally occurring amino acid
XYXXXXXXXXXVGRX

SEQ ID NO: 2729 - protein, 10 aa, Artificial Sequence
  epitope
YKIGGIGTVP

SEQ ID NO: 2730 - protein, 9 aa, Artificial Sequence
  epitope
YKIGGIGTV

SEQ ID NO: 2731 - protein, 6 aa, Artificial Sequence
  epitope
YKIGGI

SEQ ID NO: 2732 - protein, 10 aa, Artificial Sequence
  epitope
YKIGGIGTVP

SEQ ID NO: 2733 - protein, 6 aa, Artificial Sequence
  epitope
YKIGGI

SEQ ID NO: 2734 - protein, 5 aa, Artificial Sequence
  epitope
YKIGG

SEQ ID NO: 2735 - protein, 10 aa, Artificial Sequence
  epitope
GIGTVPVGRV

SEQ ID NO: 2736 - protein, 10 aa, Artificial Sequence
  epitope
YKIGGIGTVP

SEQ ID NO: 2737 - protein, 4 aa, Artificial Sequence
  epitope
KIGG

SEQ ID NO: 2738 - protein, 5 aa, Artificial Sequence
  epitope
VPVGR

SEQ ID NO: 2739 - protein, 7 aa, Artificial Sequence
  epitope
YKIGGIG

SEQ ID NO: 2740 - protein, 5 aa, Artificial Sequence
  epitope
KIGGI

SEQ ID NO: 2741 - protein, 10 aa, Artificial Sequence
  epitope
GIGTVPVGRV

SEQ ID NO: 2742 - protein, 10 aa, Artificial Sequence
  epitope
YKIGGIGTVP

SEQ ID NO: 2743 - protein, 9 aa, Artificial Sequence
  epitope
YKIGGIGTV

SEQ ID NO: 2744 - protein, 15 aa, Artificial Sequence
  epitope
  misc_feature (1)..(1): Xaa can be any naturally occurring amino acid
  misc_feature (4)..(4): Xaa can be any naturally occurring amino acid
  misc_feature (6)..(11): Xaa can be any naturally occurring amino acid
  misc_feature (13)..(15): Xaa can be any naturally occurring amino acid
XYKXGXXXXXXVXXX

SEQ ID NO: 2745 - protein, 6 aa, Artificial Sequence
  epitope
KIGGIG

SEQ ID NO: 2746 - protein, 5 aa, Artificial Sequence
  epitope
KIGGI

SEQ ID NO: 2747 - protein, 8 aa, Artificial Sequence
  epitope
YKIGGIGT

SEQ ID NO: 2748 - protein, 5 aa, Artificial Sequence
  epitope
YKIGG

SEQ ID NO: 2749 - protein, 4 aa, Artificial Sequence
  epitope
KIGG

SEQ ID NO: 2750 - protein, 9 aa, Artificial Sequence
  epitope
YKIGGIGTV

SEQ ID NO: 2751 - protein, 4 aa, Artificial Sequence
  epitope
KIGG

SEQ ID NO: 2752 - protein, 10 aa, Artificial Sequence
  epitope
YKIGGIGTVP

SEQ ID NO: 2753 - protein, 9 aa, Artificial Sequence
  epitope
YKIGGIGTV

SEQ ID NO: 2754 - protein, 9 aa, Artificial Sequence
  epitope
YKIGGIGTV

SEQ ID NO: 2755 - protein, 8 aa, Artificial Sequence
  epitope
KIGGIGTV

SEQ ID NO: 2756 - protein, 7 aa, Artificial Sequence
  epitope
KIGGIGT

SEQ ID NO: 2757 - protein, 10 aa, Artificial Sequence
  epitope
YKIGGIGTVP

SEQ ID NO: 2758 - protein, 9 aa, Artificial Sequence
  epitope
YKIGGIGTV

SEQ ID NO: 2759 - protein, 10 aa, Artificial Sequence
  epitope
YKIGGIGTVP

SEQ ID NO: 2760 - protein, 9 aa, Artificial Sequence
  epitope
YKIGGIGTV

SEQ ID NO: 2761 - protein, 10 aa, Artificial Sequence
  epitope
VYKIGGIGTV

SEQ ID NO: 2762 - protein, 9 aa, Artificial Sequence
  epitope
YKIGGIGTV

SEQ ID NO: 2763 - protein, 9 aa, Artificial Sequence
  epitope
YKIGGIGTV

SEQ ID NO: 2764 - protein, 4 aa, Artificial Sequence
  epitope
KIGG

SEQ ID NO: 2765 - protein, 5 aa, Artificial Sequence
  epitope
VPVGR

SEQ ID NO: 2766 - protein, 7 aa, Artificial Sequence
  epitope
YKIGGIG

SEQ ID NO: 2767 - protein, 4 aa, Artificial Sequence
  epitope
KIGG

SEQ ID NO: 2768 - protein, 6 aa, Artificial Sequence
  epitope
VPVGRV

SEQ ID NO: 2769 - protein, 9 aa, Artificial Sequence
  epitope
YKIGGIGTV

SEQ ID NO: 2770 - protein, 5 aa, Artificial Sequence
  epitope
YKIGG

SEQ ID NO: 2771 - protein, 7 aa, Artificial Sequence
  epitope
YKIGGIG

SEQ ID NO: 2772 - protein, 5 aa, Artificial Sequence
  epitope
YKIGG

SEQ ID NO: 2773 - protein, 9 aa, Artificial Sequence
  epitope
IGTVPVGRV

SEQ ID NO: 2774 - protein, 15 aa, Artificial Sequence
  epitope
FLKNGDAGIVKMIPT

SEQ ID NO: 2775 - protein, 5 aa, Artificial Sequence
  epitope
KNGDA

SEQ ID NO: 2776 - protein, 4 aa, Artificial Sequence
  epitope
KNGD

SEQ ID NO: 2777 - protein, 10 aa, Artificial Sequence
  epitope
KNGDAGIVKM

SEQ ID NO: 2778 - protein, 9 aa, Artificial Sequence
  epitope
DAGIVKMIP

SEQ ID NO: 2779 - protein, 5 aa, Artificial Sequence
  epitope
AGIVK

SEQ ID NO: 2780 - protein, 7 aa, Artificial Sequence
  epitope
LKNGDAG

SEQ ID NO: 2781 - protein, 4 aa, Artificial Sequence
  epitope
KNGD

SEQ ID NO: 2782 - protein, 15 aa, Artificial Sequence
  epitope
  misc_feature (1)..(10): Xaa can be any naturally occurring amino acid
XXXXXXXXXXKMIPT

SEQ ID NO: 2783 - protein, 8 aa, Artificial Sequence
  epitope
FLKNGDAG

SEQ ID NO: 2784 - protein, 5 aa, Artificial Sequence
  epitope
LKNGD

SEQ ID NO: 2785 - protein, 15 aa, Artificial Sequence
  epitope
  misc_feature (1)..(11): Xaa can be any naturally occurring amino acid
XXXXXXXXXXXMIPT

SEQ ID NO: 2786 - protein, 15 aa, Artificial Sequence
  epitope
  misc_feature (1)..(7): Xaa can be any naturally occurring amino acid
  misc_feature (9)..(10): Xaa can be any naturally occurring amino acid
  misc_feature (13)..(13): Xaa can be any naturally occurring amino acid
XXXXXXXGXXKMXPT

SEQ ID NO: 2787 - protein, 5 aa, Artificial Sequence
  epitope
LKNGD

SEQ ID NO: 2788 - protein, 4 aa, Artificial Sequence
  epitope
KNGD

SEQ ID NO: 2789 - protein, 15 aa, Artificial Sequence
  epitope
  misc_feature (1)..(7): Xaa can be any naturally occurring amino acid
  misc_feature (9)..(10): Xaa can be any naturally occurring amino acid
XXXXXXXGXXKMIPT

SEQ ID NO: 2790 - protein, 10 aa, Artificial Sequence
  epitope
LKNGDAGIVK

SEQ ID NO: 2791 - protein, 6 aa, Artificial Sequence
  epitope
VKMIPT

SEQ ID NO: 2792 - protein, 6 aa, Artificial Sequence
  epitope
  misc_feature (1)..(1): Xaa can be any naturally occurring amino acid
XKMIPT

SEQ ID NO: 2793 - protein, 7 aa, Artificial Sequence
  epitope
LKNGDAG

SEQ ID NO: 2794 - protein, 4 aa, Artificial Sequence
  epitope
KNGD

SEQ ID NO: 2795 - protein, 5 aa, Artificial Sequence
  epitope
LKNGD

SEQ ID NO: 2796 - protein, 4 aa, Artificial Sequence
  epitope
KNGD

SEQ ID NO: 2797 - protein, 5 aa, Artificial Sequence
  epitope
LKNGD

SEQ ID NO: 2798 - protein, 5 aa, Artificial Sequence
  epitope
LKNGD

SEQ ID NO: 2799 - protein, 4 aa, Artificial Sequence
  epitope
KNGD

SEQ ID NO: 2800 - protein, 4 aa, Artificial Sequence
  epitope
KNGD

SEQ ID NO: 2801 - protein, 4 aa, Artificial Sequence
  epitope
KNGD

SEQ ID NO: 2802 - protein, 6 aa, Artificial Sequence
  epitope
VKMIPT

SEQ ID NO: 2803 - protein, 6 aa, Artificial Sequence
  epitope
KNGDAG

SEQ ID NO: 2804 - protein, 5 aa, Artificial Sequence
  epitope
NGDAG

SEQ ID NO: 2805 - protein, 15 aa, Artificial Sequence
  epitope
  misc_feature (1)..(10): Xaa can be any naturally occurring amino acid
XXXXXXXXXXKMIPT

SEQ ID NO: 2806 - protein, 6 aa, Artificial Sequence
  epitope
VKMIPT

SEQ ID NO: 2807 - protein, 6 aa, Artificial Sequence
  epitope
KNGDAG

SEQ ID NO: 2808 - protein, 4 aa, Artificial Sequence
  epitope
KNGD

SEQ ID NO: 2809 - protein, 15 aa, Artificial Sequence
  epitope
VYSANTHRSKWFRVV

SEQ ID NO: 2810 - protein, 15 aa, Artificial Sequence
  epitope
  misc_feature (1)..(1): Xaa can be any naturally occurring amino acid
  misc_feature (3)..(7): Xaa can be any naturally occurring amino acid
  misc_feature (10)..(10): Xaa can be any naturally occurring amino acid
  misc_feature (12)..(15): Xaa can be any naturally occurring amino acid
XYXXXXXRSXWXXXX

SEQ ID NO: 2811 - protein, 5 aa, Artificial Sequence
  epitope
SANTH

SEQ ID NO: 2812 - protein, 15 aa, Artificial Sequence
  epitope
  misc_feature (1)..(7): Xaa can be any naturally occurring amino acid
  misc_feature (12)..(15): Xaa can be any naturally occurring amino acid
XXXXXXXRSKWXXXX

SEQ ID NO: 2813 - protein, 15 aa, Artificial Sequence
  epitope
  misc_feature (1)..(1): Xaa can be any naturally occurring amino acid
  misc_feature (3)..(4): Xaa can be any naturally occurring amino acid
  misc_feature (6)..(8): Xaa can be any naturally occurring amino acid
  misc_feature (10)..(10): Xaa can be any naturally occurring amino acid
  misc_feature (12)..(15): Xaa can be any naturally occurring amino acid
XYXXNXXXSXWXXXX

SEQ ID NO: 2814 - protein, 5 aa, Artificial Sequence
  epitope
SANTH

SEQ ID NO: 2815 - protein, 4 aa, Artificial Sequence
  epitope
NTHR

SEQ ID NO: 2816 - protein, 15 aa, Artificial Sequence
  epitope
  misc_feature (1)..(4): Xaa can be any naturally occurring amino acid
  misc_feature (8)..(8): Xaa can be any naturally occurring amino acid
  misc_feature (10)..(10): Xaa can be any naturally occurring amino acid
  misc_feature (14)..(15): Xaa can be any naturally occurring amino acid
XXXXNTHXSXWFRXX

SEQ ID NO: 2817 - protein, 6 aa, Artificial Sequence
  epitope
SANTHR

SEQ ID NO: 2818 - protein, 5 aa, Artificial Sequence
  epitope
SANTH

SEQ ID NO: 2819 - protein, 5 aa, Artificial Sequence
  epitope
KWFRV

SEQ ID NO: 2820 - protein, 15 aa, Artificial Sequence
  epitope
  misc_feature (1)..(1): Xaa can be any naturally occurring amino acid
  misc_feature (3)..(4): Xaa can be any naturally occurring amino acid
  misc_feature (7)..(7): Xaa can be any naturally occurring amino acid
  misc_feature (10)..(10): Xaa can be any naturally occurring amino acid
  misc_feature (12)..(15): Xaa can be any naturally occurring amino acid
XYXXNTXRSXWXXXX

SEQ ID NO: 2821 - protein, 5 aa, Artificial Sequence
  epitope
SANTH

SEQ ID NO: 2822 - protein, 6 aa, Artificial Sequence
  epitope
SANTHR

SEQ ID NO: 2823 - protein, 10 aa, Artificial Sequence
  epitope
NTHRSKWFRV

SEQ ID NO: 2824 - protein, 15 aa, Artificial Sequence
  epitope
  misc_feature (5)..(7): Xaa can be any naturally occurring amino acid
  misc_feature (9)..(15): Xaa can be any naturally occurring amino acid
VYSAXXXRXXXXXXX

SEQ ID NO: 2825 - protein, 6 aa, Artificial Sequence
  epitope
YSANTH

SEQ ID NO: 2826 - protein, 4 aa, Artificial Sequence
  epitope
SANT

SEQ ID NO: 2827 - protein, 15 aa, Artificial Sequence
  epitope
  misc_feature (1)..(3): Xaa can be any naturally occurring amino acid
  misc_feature (8)..(10): Xaa can be any naturally occurring amino acid
  misc_feature (13)..(15): Xaa can be any naturally occurring amino acid
XXXANTHXXXWFXXX

SEQ ID NO: 2828 - protein, 9 aa, Artificial Sequence
  epitope
SANTHRSKW

SEQ ID NO: 2829 - protein, 9 aa, Artificial Sequence
  epitope
  misc_feature (1)..(1): Xaa can be any naturally occurring amino acid
  misc_feature (6)..(8): Xaa can be any naturally occurring amino acid
XANTHXXXW

SEQ ID NO: 2830 - protein, 15 aa, Artificial Sequence
  epitope
YIVVEGRDGYFEMAC

SEQ ID NO: 2831 - protein, 15 aa, Artificial Sequence
  epitope
  misc_feature (2)..(3): Xaa can be any naturally occurring amino acid
  misc_feature (5)..(5): Xaa can be any naturally occurring amino acid
  misc_feature (10)..(10): Xaa can be any naturally occurring amino acid
  misc_feature (12)..(15): Xaa can be any naturally occurring amino acid
YXXVXGRDGXFXXXX

SEQ ID NO: 2832 - protein, 6 aa, Artificial Sequence
  epitope
YIVVEG

SEQ ID NO: 2833 - protein, 9 aa, Artificial Sequence
  epitope
EGRDGYFEM

SEQ ID NO: 2834 - protein, 9 aa, Artificial Sequence
  epitope
  misc_feature (1)..(1): Xaa can be any naturally occurring amino acid
  misc_feature (6)..(6): Xaa can be any naturally occurring amino acid
  misc_feature (8)..(9): Xaa can be any naturally occurring amino acid
XGRDGXFXX

SEQ ID NO: 2835 - protein, 15 aa, Artificial Sequence
  epitope
  misc_feature (2)..(2): Xaa can be any naturally occurring amino acid
  misc_feature (5)..(5): Xaa can be any naturally occurring amino acid
  misc_feature (7)..(7): Xaa can be any naturally occurring amino acid
  misc_feature (10)..(15): Xaa can be any naturally occurring amino acid
YXVVXGXDGXXXXXX

SEQ ID NO: 2836 - protein, 5 aa, Artificial Sequence
  epitope
IVVEG

SEQ ID NO: 2837 - protein, 9 aa, Artificial Sequence
  epitope
EGRDGYFEM

SEQ ID NO: 2838 - protein, 5 aa, Artificial Sequence
  epitope
IVVEG

SEQ ID NO: 2839 - protein, 9 aa, Artificial Sequence
  epitope
EGRDGYFEM

SEQ ID NO: 2840 - protein, 15 aa, Artificial Sequence
  epitope
  misc_feature (6)..(6): Xaa can be any naturally occurring amino acid
  misc_feature (9)..(15): Xaa can be any naturally occurring amino acid
YIVVEXRDXXXXXXX

SEQ ID NO: 2841 - protein, 15 aa, Artificial Sequence
  epitope
  misc_feature (2)..(3): Xaa can be any naturally occurring amino acid
  misc_feature (6)..(6): Xaa can be any naturally occurring amino acid
  misc_feature (10)..(10): Xaa can be any naturally occurring amino acid
  misc_feature (12)..(15): Xaa can be any naturally occurring amino acid
YXXVEXRDGXFXXXX

SEQ ID NO: 2842 - protein, 6 aa, Artificial Sequence
  epitope
YIVVEG

SEQ ID NO: 2843 - protein, 5 aa, Artificial Sequence
  epitope
IVVEG

SEQ ID NO: 2844 - protein, 9 aa, Artificial Sequence
  epitope
EGRDGYFEM

SEQ ID NO: 2845 - protein, 6 aa, Artificial Sequence
  epitope
YIVVEG

SEQ ID NO: 2846 - protein, 5 aa, Artificial Sequence
  epitope
IVVEG

SEQ ID NO: 2847 - protein, 10 aa, Artificial Sequence
  epitope
EGRDGYFEMA

SEQ ID NO: 2848 - protein, 9 aa, Artificial Sequence
  epitope
EGRDGYFEM

SEQ ID NO: 2849 - protein, 15 aa, Artificial Sequence
  epitope
  misc_feature (3)..(3): Xaa can be any naturally occurring amino acid
  misc_feature (12)..(15): Xaa can be any naturally occurring amino acid
YIXVEGRDGYFXXXX

SEQ ID NO: 2850 - protein, 5 aa, Artificial Sequence
  epitope
IVVEG

SEQ ID NO: 2851 - protein, 9 aa, Artificial Sequence
  epitope
EGRDGYFEM

SEQ ID NO: 2852 - protein, 5 aa, Artificial Sequence
  epitope
IVVEG

SEQ ID NO: 2853 - protein, 9 aa, Artificial Sequence
  epitope
EGRDGYFEM

SEQ ID NO: 2854 - protein, 15 aa, Artificial Sequence
  epitope
  misc_feature (2)..(2): Xaa can be any naturally occurring amino acid
  misc_feature (5)..(6): Xaa can be any naturally occurring amino acid
  misc_feature (10)..(10): Xaa can be any naturally occurring amino acid
  misc_feature (12)..(15): Xaa can be any naturally occurring amino acid
YXVVXXRDGXFXXXX

SEQ ID NO: 2855 - protein, 15 aa, Artificial Sequence
  epitope
  misc_feature (2)..(6): Xaa can be any naturally occurring amino acid
  misc_feature (8)..(8): Xaa can be any naturally occurring amino acid
  misc_feature (10)..(10): Xaa can be any naturally occurring amino acid
  misc_feature (12)..(15): Xaa can be any naturally occurring amino acid
YXXXXXRXGXFXXXX

SEQ ID NO: 2856 - protein, 5 aa, Artificial Sequence
  epitope
IVVEG

SEQ ID NO: 2857 - protein, 9 aa, Artificial Sequence
  epitope
EGRDGYFEM

SEQ ID NO: 2858 - protein, 15 aa, Artificial Sequence
  epitope
  misc_feature (2)..(4): Xaa can be any naturally occurring amino acid
  misc_feature (6)..(6): Xaa can be any naturally occurring amino acid
  misc_feature (8)..(8): Xaa can be any naturally occurring amino acid
  misc_feature (10)..(15): Xaa can be any naturally occurring amino acid
YXXXVXGXDXXXXXX

SEQ ID NO: 2859 - protein, 15 aa, Artificial Sequence
  epitope
  misc_feature (2)..(5): Xaa can be any naturally occurring amino acid
  misc_feature (15)..(15): Xaa can be any naturally occurring amino acid
YXXXXGRDGYFEMAX

SEQ ID NO: 2860 - protein, 15 aa, Artificial Sequence
  epitope
  misc_feature (2)..(5): Xaa can be any naturally occurring amino acid
  misc_feature (12)..(12): Xaa can be any naturally occurring amino acid
  misc_feature (15)..(15): Xaa can be any naturally occurring amino acid
YXXXXGRDGYFXMAX

SEQ ID NO: 2861 - protein, 15 aa, Artificial Sequence
  epitope
  misc_feature (2)..(5): Xaa can be any naturally occurring amino acid
  misc_feature (8)..(8): Xaa can be any naturally occurring amino acid
  misc_feature (12)..(13): Xaa can be any naturally occurring amino acid
  misc_feature (15)..(15): Xaa can be any naturally occurring amino acid
YXXXXGRXGYFXXAX

SEQ ID NO: 2862 - protein, 5 aa, Artificial Sequence
  epitope
IVVEG

SEQ ID NO: 2863 - protein, 10 aa, Artificial Sequence
  epitope
VEGRDGYFEM

SEQ ID NO: 2864 - protein, 5 aa, Artificial Sequence
  epitope
IVVEG

SEQ ID NO: 2865 - protein, 9 aa, Artificial Sequence
  epitope
EGRDGYFEM

SEQ ID NO: 2866 - protein, 15 aa, Artificial Sequence
  epitope
  misc_feature (2)..(6): Xaa can be any naturally occurring amino acid
  misc_feature (8)..(8): Xaa can be any naturally occurring amino acid
  misc_feature (10)..(10): Xaa can be any naturally occurring amino acid
  misc_feature (12)..(14): Xaa can be any naturally occurring amino acid
YXXXXXRXGXFXXXC

SEQ ID NO: 2867 - protein, 9 aa, Artificial Sequence
  epitope
YIVVEGRDG

SEQ ID NO: 2868 - protein, 8 aa, Artificial Sequence
  epitope
EGRDGYFE

SEQ ID NO: 2869 - protein, 15 aa, Artificial Sequence
  epitope
  misc_feature (3)..(3): Xaa can be any naturally occurring amino acid
  misc_feature (5)..(6): Xaa can be any naturally occurring amino acid
  misc_feature (10)..(10): Xaa can be any naturally occurring amino acid
  misc_feature (12)..(13): Xaa can be any naturally occurring amino acid
  misc_feature (15)..(15): Xaa can be any naturally occurring amino acid
YIXVXXRDGXFXXAX

SEQ ID NO: 2870 - protein, 15 aa, Artificial Sequence
  epitope
  misc_feature (2)..(6): Xaa can be any naturally occurring amino acid
  misc_feature (10)..(10): Xaa can be any naturally occurring amino acid
  misc_feature (12)..(15): Xaa can be any naturally occurring amino acid
YXXXXXRDGXFXXXX

SEQ ID NO: 2871 - protein, 5 aa, Artificial Sequence
  epitope
VVEGR

SEQ ID NO: 2872 - protein, 10 aa, Artificial Sequence
  epitope
EGRDGYFEMA

SEQ ID NO: 2873 - protein, 10 aa, Artificial Sequence
  epitope
  misc_feature (1)..(2): Xaa can be any naturally occurring amino acid
  misc_feature (6)..(6): Xaa can be any naturally occurring amino acid
  misc_feature (8)..(9): Xaa can be any naturally occurring amino acid
XXRDGXFXXA

SEQ ID NO: 2874 - protein, 10 aa, Artificial Sequence
  epitope
  misc_feature (1)..(2): Xaa can be any naturally occurring amino acid
  misc_feature (6)..(6): Xaa can be any naturally occurring amino acid
  misc_feature (8)..(10): Xaa can be any naturally occurring amino acid
XXRDGXFXXX

SEQ ID NO: 2875 - protein, 4 aa, Artificial Sequence
  epitope
VVEG

SEQ ID NO: 2876 - protein, 15 aa, Artificial Sequence
  epitope
  misc_feature (6)..(10): Xaa can be any naturally occurring amino acid
  misc_feature (13)..(15): Xaa can be any naturally occurring amino acid
YIVVEXXXXXFEXXX

SEQ ID NO: 2877 - protein, 4 aa, Artificial Sequence
  epitope
VVEG

SEQ ID NO: 2878 - protein, 5 aa, Artificial Sequence
  epitope
IVVEG

SEQ ID NO: 2879 - protein, 9 aa, Artificial Sequence
  epitope
EGRDGYFEM

SEQ ID NO: 2880 - protein, 15 aa, Artificial Sequence
  epitope
NSQLIQMQQLQIQQQ

SEQ ID NO: 2881 - protein, 15 aa, Artificial Sequence
  epitope
QEQQQYYPQQQAFFL

SEQ ID NO: 2882 - protein, 6 aa, Artificial Sequence
  epitope
SFPQQQ

SEQ ID NO: 2883 - protein, 10 aa, Artificial Sequence
  epitope
LKIGATEPSQ

SEQ ID NO: 2884 - protein, 4 aa, Artificial Sequence
  epitope
IGAT

SEQ ID NO: 2885 - protein, 15 aa, Artificial Sequence
  epitope
QQYYPQQQAFFLLQQ

SEQ ID NO: 2886 - protein, 5 aa, Artificial Sequence
  epitope
PLVQQ

SEQ ID NO: 2887 - protein, 5 aa, Artificial Sequence
  epitope
KLVQQ

SEQ ID NO: 2888 - protein, 8 aa, Artificial Sequence
  epitope
QQFPGQQQ

SEQ ID NO: 2889 - protein, 10 aa, Artificial Sequence
  epitope
ILFEETLYQS

SEQ ID NO: 2890 - protein, 5 aa, Artificial Sequence
  epitope
QSTKG

SEQ ID NO: 2891 - protein, 4 aa, Artificial Sequence
  epitope
QSTK

SEQ ID NO: 2892 - protein, 7 aa, Artificial Sequence
  epitope
PQPQPFP

SEQ ID NO: 2893 - protein, 9 aa, Artificial Sequence
  epitope
QQFPGQQQP

SEQ ID NO: 2894 - protein, 4 aa, Artificial Sequence
  epitope
AAAA

SEQ ID NO: 2895 - protein, 5 aa, Artificial Sequence
  epitope
QQFPG

SEQ ID NO: 2896 - protein, 7 aa, Artificial Sequence
  epitope
QLVPQLQ

SEQ ID NO: 2897 - protein, 7 aa, Artificial Sequence
  epitope
QPYPQLQ

SEQ ID NO: 2898 - protein, 7 aa, Artificial Sequence
  epitope
QQPPFLQ

SEQ ID NO: 2899 - protein, 7 aa, Artificial Sequence
  epitope
QDMPYLQ

SEQ ID NO: 2900 - protein, 15 aa, Artificial Sequence
  epitope
NEPSQLSIDQNAQGL

SEQ ID NO: 2901 - protein, 7 aa, Artificial Sequence
  epitope
QVPLVQQ

SEQ ID NO: 2902 - protein, 5 aa, Artificial Sequence
  epitope
YNPDK

SEQ ID NO: 2903 - protein, 6 aa, Artificial Sequence
  epitope
FVPISG

SEQ ID NO: 2904 - protein, 6 aa, Artificial Sequence
  epitope
KEAANF

SEQ ID NO: 2905 - protein, 6 aa, Artificial Sequence
  epitope
SQVIIM

SEQ ID NO: 2906 - protein, 7 aa, Artificial Sequence
  epitope
VSSYLKK

SEQ ID NO: 2907 - protein, 6 aa, Artificial Sequence
  epitope
KVGYNP

SEQ ID NO: 2908 - protein, 6 aa, Artificial Sequence
  epitope
SGKELE

SEQ ID NO: 2909 - protein, 4 aa, Artificial Sequence
  epitope
PKFL

SEQ ID NO: 2910 - protein, 15 aa, Artificial Sequence
  epitope
SLAEYTVRTLQRTVP

SEQ ID NO: 2911 - protein, 6 aa, Artificial Sequence
  epitope
TVRTLQ

SEQ ID NO: 2912 - protein, 7 aa, Artificial Sequence
  epitope
QVPLVQQ

SEQ ID NO: 2913 - protein, 7 aa, Artificial Sequence
  epitope
QQFPGQQ

SEQ ID NO: 2914 - protein, 5 aa, Artificial Sequence
  epitope
YLSGV

SEQ ID NO: 2915 - protein, 9 aa, Artificial Sequence
  epitope
CTIAPFGIF

SEQ ID NO: 2916 - protein, 6 aa, Artificial Sequence
  epitope
GIFGTN

SEQ ID NO: 2917 - protein, 9 aa, Artificial Sequence
  epitope
RLLRGIRNY

SEQ ID NO: 2918 - protein, 7 aa, Artificial Sequence
  epitope
IRNYRVA

SEQ ID NO: 2919 - protein, 5 aa, Artificial Sequence
  epitope
SRLLR

SEQ ID NO: 2920 - protein, 10 aa, Artificial Sequence
  epitope
LLRGIRNYRV

SEQ ID NO: 2921 - protein, 7 aa, Artificial Sequence
  epitope
RNYRVAI

SEQ ID NO: 2922 - protein, 6 aa, Artificial Sequence
  epitope
GIDKRV

SEQ ID NO: 2923 - protein, 9 aa, Artificial Sequence
  epitope
KRVIERFEK

SEQ ID NO: 2924 - protein, 4 aa, Artificial Sequence
  epitope
GIDK

SEQ ID NO: 2925 - protein, 10 aa, Artificial Sequence
  epitope
DKRVIERFEK

SEQ ID NO: 2926 - protein, 4 aa, Artificial Sequence
  epitope
QVSF

SEQ ID NO: 2927 - protein, 10 aa, Artificial Sequence
  epitope
SFQPSQLNPQ

SEQ ID NO: 2928 - protein, 6 aa, Artificial Sequence
  epitope
YKGPTL

SEQ ID NO: 2929 - protein, 8 aa, Artificial Sequence
  epitope
YKIGGIGT

SEQ ID NO: 2930 - protein, 5 aa, Artificial Sequence
  epitope
AGIVK

SEQ ID NO: 2931 - protein, 6 aa, Artificial Sequence
  epitope
VKMIPT

SEQ ID NO: 2932 - protein, 6 aa, Artificial Sequence
  epitope
YIVVEG
